(19) United States
(12) Patent Application Publication
(10) Pub. No.: US 2021/0139547 A1
(43) Pub. Date: May 13, 2021

(54) OPTOGENETIC INDUCTION OF NEURODEGENERATIVE DISEASE PATHOLOGIES

(71) Applicant: UNIVERSITY OF PITTSBURGH-OF THE COMMONWEALTH SYSTEM OF HIGHER EDUCATION, Pittsburgh, PA (US)

(72) Inventors: Christopher James DONNELLY, Pittsburgh, PA (US); Jacob R. MANN, Pittsburgh, PA (US)

(21) Appl. No.: 16/491,758

(22) PCT Filed: Mar. 7, 2018
(86) PCT No.: PCT/US18/21335

§ 371 Date: Sep. 6, 2019

Related U.S. Application Data
(60) Provisional application No. 62/468,065, filed on Mar. 7, 2017.

(51) Int. Cl. C07K 14/47; C12N 15/62; C12N 15/79; G01N 33/50

(52) U.S. Cl. CPC C07K 14/47; C12N 15/62; G01N 2800/28; G01N 33/5008; C12N 15/79

(57) ABSTRACT

The present disclosure relates to compounds, compositions, and methods for the inducing neurodegenerative disease pathologies. In one aspect, disclosed herein is a nucleotide sequence encoding a chimeric polypeptide, comprising: a first nucleotide sequence encoding a light-induced oligomerization domain and a second nucleotide sequence encoding a neurodegenerative disease in target protein. Disclosed herein is a method of inducing a neurodegenerative disease pathology in a cell, comprising the steps: introducing into the cell an expression vector encoding a chimeric polypeptide, comprising: a first nucleotide sequence encoding a light-induced oligomerization domain and a second nucleotide sequence encoding a low complexity domain from a neurodegenerative disease target protein, wherein the first nucleotide sequence is operably linked to a promoter; expressing the chimeric polypeptide; and inducing oligomerization of the chimeric polypeptide by stimulation with blue light.

### CROSS REFERENCE TO RELATED APPLICATIONS

[0001] This application claims the benefit of U.S. Provisional Patent Application Ser. No. 62/468,065 filed Mar. 7, 2017, the disclosure of which is expressly incorporated herein by reference.

### FIELD

[0002] The present disclosure relates to compounds, compositions, and methods for the inducing neurodegenerative disease pathologies.

### BACKGROUND

[0003] The world is aging. By the year 2050, the proportion of individuals over the age of 60 will have doubled to 2 billion from 605 million in 2000. Unfortunately, aging is the single greatest risk factor for developing a fatal neurodegenerative disease. In turn, the number of individuals with dementias such as Alzheimer's disease (AD), Lewy Body Dementia (LBD), Frontotemporal Dementia (FTD), and movement disorders such as Parkinson's Disease (PD) and Amyotrophic Lateral Sclerosis (ALS) will significantly increase. Nearly 6.5 million individuals within the United States are currently living with one of these diseases and the associated costs are unsustainable.

[0004] In the United States, the current economic burden of AD, PD, and ALS is an estimated $241 billion dollars per year. AD and ALS/FTD patients can incur personal medical costs upwards of $100,000-$250,000 per year. For AD, it is estimated that 13.8 million individuals in the United States will have been diagnosed by 2050, up from 4.7 million in 2010, while the worldwide number of ALS cases will rise ˜31% by 2040 and no effective treatment currently exists for these disorders. Despite a variety of genetic mutations that contribute to these neurodegenerative disorders, there is no known single cause. However, despite this diversity, nearly all patients within each disease exhibit a common neuropathological hallmark in the form of intracellular protein aggregates. Animal models to recapitulate these neuropathologies currently require using either genetic mutations or grossly overexpressing proteins and these often do not mimic patient pathology. What is needed are new and improved methods for inducing neurodegenerative disease pathologies in cell lines and animal models.

[0005] The compounds, compositions, and methods disclosed herein address these and other needs.

### SUMMARY

[0006] Disclosed herein are compounds, compositions, and methods for inducing neurodegenerative disease pathologies in a cell or animal. The inventors have developed new methods for inducing neurodegenerative disease pathologies in cells and animals without the need for genetic mutations or grossly overexpressing neurodegenerative disease proteins.

[0007] In one aspect, disclosed herein is a nucleotide sequence encoding a chimeric polypeptide, comprising: a first nucleotide sequence encoding a light-induced oligomerization domain and a second nucleotide sequence encoding a low complexity domain from a neurodegenerative disease target protein.

[0008] In one aspect, disclosed herein is an expression vector encoding a chimeric polypeptide, comprising: a first nucleotide sequence encoding a light-induced oligomerization domain and a second nucleotide sequence encoding a low complexity domain from a neurodegenerative disease target protein, wherein the first nucleotide sequence is operably linked to a promoter.

[0009] In one aspect, disclosed herein is a cell comprising a nucleotide sequence encoding a chimeric polypeptide, comprising: a first nucleotide sequence encoding a light-induced oligomerization domain and a second nucleotide sequence encoding a neurodegenerative disease target protein.

[0010] In one aspect, disclosed herein is a chimeric polypeptide comprising: a light-induced oligomerization domain; and a low complexity domain from a neurodegenerative disease target protein.

[0011] In one aspect, disclosed herein is a method of inducing a neurodegenerative disease pathology in a cell, comprising the steps:

introducing into the cell an expression vector encoding a chimeric polypeptide, comprising:
[0012] a first nucleotide sequence encoding a light-induced oligomerization domain and a second nucleotide sequence encoding a low complexity domain from a neurodegenerative disease target protein, wherein the first nucleotide sequence is operably linked to a promoter;
   expressing the chimeric polypeptide; and
   inducing oligomerization of the chimeric polypeptide by stimulation with blue light.

[0013] In another aspect, disclosed herein is a method of screening for an agent that modulates protein aggregation, comprising the steps:

introducing into a cell an expression vector encoding a chimeric polypeptide, comprising:
[0014] a first nucleotide sequence encoding a light-induced oligomerization domain and a second nucleotide sequence encoding a low complexity domain from a neurodegenerative disease target protein, wherein the first nucleotide sequence is operably linked to a promoter;
   expressing the chimeric polypeptide;
   introducing the agent into a culture media comprising the cell;
   inducing oligomerization of the chimeric polypeptide by stimulation with blue light; and
   determining modulation of protein aggregation by the agent.

[0015] In one embodiment, the light-induced oligomerization domain is selected from the group consisting of CRYPHR, CRY2OLIG, NcVVD, NcVVDY50W, NcLOV, VfAU1, YtvA, EL222, RsLOV, and AsLOV2. In one embodiment, the light-induced oligomerization domain is selected from the list of domains in Table 2. In one embodiment, the light-induced oligomerization domain is NcVVDY50W. In one embodiment, the light-induced oligomerization domain is CRY2OLIG. In one embodiment, the light-induced oligomerization domain is CRYPHR.

[0016] In one embodiment, the light-induced oligomerization domain is selected from the group consisting of a CRY2 PHR domain (for example, CRY2 PHR, CRY2OLIG) or a light-oxygen-voltage-sensing (LOV) domain (for example, NcVVD, NcVVDY50W, VfAU1, YtvA, EL222, RsLOV, AsLOV2).

[0017] In one embodiment, the low complexity domain from a neurodegenerative disease target protein is selected from the group consisting of TDP-43, Alpha synuclein, Tau, Fus, TIA1, SOD1, Huntingtin, Ataxin 2, hnRNPA1, hnRNPA2B1, EWS RNA Binding Protein 1, and TATA box binding protein factor 15. In one embodiment, the low complexity domain from a neurodegenerative disease target protein is selected from Table 3. In one embodiment, the low complexity domain from a neurodegenerative disease target protein is TDP-43. In one embodiment, the low complexity domain from a neurodegenerative disease target protein is Alpha synuclein. In one embodiment, the low complexity domain from a neurodegenerative disease target protein is Tau.

[0018] In one embodiment, the cell is a mammalian cell. In one embodiment, the cell is a human cell.

[0019] In one embodiment, the blue light has a wavelength between 405 nm and 499 nm. In one embodiment, the blue light has a wavelength of about 465 nm.

### BRIEF DESCRIPTION OF THE DRAWINGS

[0020] The accompanying figures, which are incorporated in and constitute a part of this specification, illustrate several aspects described below.

[0021] FIG. 1 shows the examples of genetic causes of ALS and the common neuropathology. The left panel shows a graph of the number of ALS-causing genes on the Y axis, and the X axis indicates the year each mutation was discovered. FIG. 1, panel A shows that ALS exhibits extreme genetic heterogeneity, especially since these mutations are found in only ˜10% of ALS cases. As described in Table 1, despite these genetic causes of ALS, nearly all patients show the same neuropathology in the motor cortex and spinal cord. The right panel shows an example of ALS neuropathology by H and E staining of paraffin tissue sections from an ALS patient motor cortex. Shown are cytoplasmic aggregates of TDP-43. TDP-43 is predominantly nuclear in normal cells as represented by *. In ALS, TDP-43 is absent from the nucleus and aggregates in the cytoplasm as shown by the arrow. Although ALS is used as an example, cytoplasmic aggregate neuropathology is a common feature of many neurodegenerative diseases, see Table 1.

[0022] FIGS. 2A-2B describe methods to generate neuropathological aggregate proteins containing an LCD/IDR/Prion-like domain with light using TDP-43 and CRY2OLIG as an example. Various protein arrangements and blue light exposure paradigms were developed to induce protein aggregation of proteins and protein fragments containing LCD/IDR/prion-like domains, promote the mislocalization of nuclear proteins and recapitulate the neuropathology of neurodegenerative diseases. TDP-43 is a predominantly nuclear protein that contains an IDR/IDD/prion-like domain, and is mislocalized and aggregated in ALS, FTD, and some AD patients, as an example. DNA sequences were engineered to generate amino acid sequences that encode for a the CRY2OLIG protein that clusters when exposed to blue light generated a fusion protein either the entire TDP-43 protein (cry2-TDP43-mCh) or just the low complexity domain (LCD/IDD/prion-like domain), which makes TDP-43 aggregation prone (Cry2-274-mCh). As a control, CRY2OLIG alone was used. All constructs were fused to a fluorescent protein called mCherry (mCh) to visualize the proteins in live cells. CRY2OLIG-mCh reversibly clusters with blue light stimulation but the CRY2OLIG-TDP-43-mCh or the truncated CRY2OLIG-274-mCh forms irreversible aggregates with specific blue light stimulation paradigms. FIG. 2A shows examples of the CRY2OLIG-TDP-43 arrangements and truncated CRY2OLIG-274 arrangements used in this work. FIG. 2B shows a model of the described technology.

[0023] FIG. 3 shows a schematic describing blue light induced oligomerization and aggregation of proteins employing the NcVVD, NcVVDY50W or NcLOV photoreceptor. The NcVVD or LOV domain have only been shown to homodimerize with blue light stimulation. A light exposure paradigm to induce oligomerization and aggregation was developed. The top panel shows a schematic of how a single acute stimulation with blue light (405-499 nm) induces the homodimerization of the LOV protein when fused to a protein of interest. The bottom panel shows that chronic stimulation with blue light promotes the homooligomerization of NcVVD or LOV fusion proteins that contain a prion-like domain/LCD/IDD.

[0024] FIGS. 4A-4E show light-induced aggregation of low-complexity domain proteins. Optogenetic TDP-43 fragments containing the low-complexity domain (LCD) undergo progressive aggregation with light stimulation. (FIGS. 4A-4B) C-terminal fragments of TDP-43 (optoRRM2+LCD/optoLCD) rapidly oligomerize after a brief pulse (8 sec, 10% laser power, 488 nm) of blue light when monitored by live confocal microscopy. These oligomers persist much longer than the Cry2 photoreceptor alone (˜10 min disassembly). (FIGS. 4C-4D) Optogenetic LCD fragments also continue to aggregate following brief light pulses, growing in size over time. (FIG. 4E) Persistent blue light stimulation of the TDP-43 LCD forms intracellular aggregates in the cells. Fluorescent recovery after photobleaching (FRAP) experiments show that persistent light LCD inclusions do not recover from FRAP indicating that these are insoluble.

[0025] FIGS. 5A-5K show chronic blue light stimulation induces optoTDP43 mislocalization and aggregation that recapitulates pathological hallmarks seen in patient CNS tissue. HEK293 cells expressing optoTDP43-mCh were exposed to 488 nm LED stimulation or darkness for up to 36 hours. (FIG. 5A-5C) Representative images showing optoTDP43 that (FIG. 5B) first experiences gradual cytoplasmic mislocalization, (FIG. 5C) which was confirmed by nuclear/cytoplasmic fractionation. (FIG. 5D) Mislocalization is followed by optoTDP43 aggregation, as measured by simultaneous chronic blue light exposure and high-throughput automated confocal microscopy, that increases in propensity with increasing light exposure. (FIG. 5E) Fluorescence recovery after photobleaching (FRAP) imaging was performed to assess dynamicity of optoTDP43 structures. Lack of fluorescence recovery shows that light-induced optoTDP43 aggregates are non-dynamic, immobile granules reminiscent of aggregated structures. (FIG. 5F) Detergent-solubility of optoTDP43 structures was assessed by subcellular fractionation to confirm aggregated state of light-induced optoTDP43 granules. (Left lanes) Non-optogenetic TDP-43 (TDP43-mCh) shows no changes in solubility with and without light treatment, while optoTDP43 (right lanes) displays a drastic shift to the insoluble fraction with chronic blue light stimulation. In addition to increased insolubility of exogenous, full-length optoTDP43 (top band), chronic blue light exposure also results in recruitment of aberrant optoTDP43 cleavage products (middle bands), as well as endogenous full-length TDP-43 and disease-relevant cleavage products (bottom bands), to the detergent-insoluble, urea-soluble fraction of cell lysates as is observed in patient tissue. (FIG. 5G) To confirm direct recruitment of non-optogenetic TDP-43 species to exogenous light-induced optoTDP43 inclusions, EGFP-tagged TDP-43 was co-expressed with optoTDP43 or the Cry2 photoreceptor-only control. In cells exposed to chronic blue light stimulation, strong co-localization is observed between optoTDP43 inclusions and EGFP-TDP43, confirming the ability of optoTDP43 inclusions to directly recruit other TDP-43 species. This recruitment appears to be dependent on TDP43:TDP43 interactions, as no co-localization is observed with Cry2-mCh puncta following blue light exposure. (FIG. 5H-5J) Immunofluorescence analysis was performed on light-induced optoTDP43 aggregates to confirm pathological hallmarks seen in patient tissue. optoTDP43 inclusions appear to be (FIG. 5H) ubiquitinated, (FIG. 5I) hyperphosphorylated, and (FIG. 5J) p62-positive, all of which have been observed with TDP-43 inclusions in patient CNS. (FIG. 5K) Automated high-throughput confocal microscopy was performed to assess the neurotoxicity of light-induced optoTDP43 inclusions. Human ReN neurons expressing TDP43-mCh or optoTDP43 were exposed to chronic blue light stimulation and viability was simultaneously monitored by longitudinal imaging. Neurons expressing non-optogenetic TDP43-mCh showed no significant decrease in survival with or without blue light exposure. However, neurons expressing optoTDP43 that were exposed to blue light stimulation display significantly decreased viability over time, suggesting optoTDP43 inclusions are neurotoxic. *=p<0.05, **=p<0.01

[0026] FIGS. 6A-6E show chronic stimulation of CRY2OLIG α-synuclein or α-synuclein LOV induces clustering and aggregation. Chronic stimulation of a CRY2-asyn-mCh was tested to induce clustering or the α-synuclein protein. FIG. 6A shows the chronic stimulation paradigm and FIG. 6B shows representative images of α-synuclein clustering with light over time along with quantification of clustering in FIG. 6C. These data indicate that this optogenetic system can be employed to induce the clustering and aggregation of multiple neurodegenerative disease proteins that are prone to aggregation, that is, contain prion-like domains/LCD/IDDs. FIG. 6D shows that α-synuclein fused to the LOV (dimerizing photoreceptor) forms intracellular clusters of alpha synuclein. FIG. 6E shows that light induced α-synuclein LOV aggregates exhibit pathological hallmarks of synucleinopathies including phosphorylation at serine 129 and p62 positivity.

[0027] FIGS. 7A-7D show Cry2-Tau fusion protein shows pathological markers for various tauopathies. (FIGS. 7A-7C) HEK293 cells expressing Cry2 photoreceptor-alone or Cry2-Tau fusion proteins were exposed to chronic blue light stimulation (16 hours, 488 nm, 10 mW). Cry2-Tau-expressing cells show fibril-like aggregates that co-stain with phospho-Tau antibodies AT8 (FIG. 7A) and PHF1 (FIG. 7B), as well as the pathological conformation-dependent Tau antibody MC1 (FIG. 7C). (FIG. 7D) Summary showing the various optogenetic Tau constructs that co-localize with pathological Tau antibodies after light-induction of neurofibrillary tangle formation.

[0028] FIGS. 8A-8E show LOV-Tau fusion proteins also show pathological markers for various tauopathies and are insoluble. (FIG. 8A-FIG. 8B) HEK293 cells expressing VVD-Tau or VfAU-Tau fusion proteins were exposed to chronic blue light stimulation (16 hours, 488 nm, 10 mW). Both fusion proteins co-stain with phospho-Tau antibodies AT8 and PHF1, and the pathological conformation-dependent Tau antibody MC1. (FIG. 8C) Differentiated MAP2+ human ReN neurons expressing VVD-Tau also shows neurofibrillary tangle formation following chronic light treatment that co-localizes with AT8. (FIG. 8D) Fluorescence recovery after photobleaching analysis was performed on light-induced tangles and shows a lack of fluorescence recovery, indicating a non-dynamic, immobile structure. (FIG. 8E) Urea extraction was next performed to confirm insoluble tau species with light treatment in HEK293 cells expressing VVD-Tau. Cells exposed to chronic light show increased levels of soluble and insoluble 150 kDa tau species which is present in Alzheimer's Disease and Frontotemporal Dementia patient tissue.

[0029] FIGS. 9A-9B show the aggregation potential of CRY2 or VVD fusion proteins based on the protein arrangement and light stimulation paradigm combination. Studies indicate that the ability of Cry2 or VVD photoreceptor to stimulate clustering and activation are dependent on the protein arrangement as well as the light stimulation paradigm. FIG. 9A shows that a TDP-43-CRY2OLIG-mCh protein mislocalizes but does not exhibit the ability to aggregate as the CRY2OLIG-TDP-43-mCh arrangement does. Similarly, FIG. 9B shows that the mCh-aSyn-NvVVDY50W does not have the ability to aggregate. This data shows that the protein arrangement and light stimulation paradigms are important for inducing neuropathological protein aggregates as observed in the CNS tissue of patients with neurodegenerative disease.

[0030] FIGS. 10A-10B show that blue light induced TDP-43 aggregates or truncated LCD/IDR/prion-like domain aggregates are toxic to cells. FIG. 10A shows that acute stimulation of HEK cells expressing CRY2OLIG-TDP274-mCh can induce the formation of pathological aggregates within 1 hour. These aggregates can grow in size and become toxic over time. FIG. 10B is a schematic of a screening pipeline to use the induction of neurodegenerative disease pathology to identify therapeutic compounds that rescue toxicity and prevent or remove the formation of the induced neurodegenerative disease pathology.

### DETAILED DESCRIPTION

[0031] Disclosed herein are compounds, compositions, and methods for inducing neurodegenerative disease pathologies in a cell or animal. The inventors have developed new methods for inducing neurodegenerative disease pathologies in cells and animals without the need for genetic mutations or grossly overexpressing neurodegenerative disease proteins.

[0032] Reference will now be made in detail to the embodiments of the invention, examples of which are illustrated in the drawings and the examples. This invention may, however, be embodied in many different forms and should not be construed as limited to the embodiments set forth herein.

[0033] Unless defined otherwise, all technical and scientific terms used herein have the same meaning as commonly understood to one of ordinary skill in the art to which this disclosure belongs. The term “comprising” and variations thereof as used herein is used synonymously with the term “including” and variations thereof and are open, non-limiting terms. Although the terms “comprising” and “including” have been used herein to describe various embodiments, the terms “consisting essentially of” and “consisting of” can be used in place of “comprising” and “including” to provide for more specific embodiments and are also disclosed.

[0034] The following definitions are provided for the full understanding of terms used in this specification.

### Terminology

[0035] As used herein, the article “a,” “an,” and “the” means “at least one,” unless the context in which the article is used clearly indicates otherwise.

[0036] The term “about” as used herein when referring to a measurable value such as an amount, a percentage, and the like, is meant to encompass variations of ±20%, ±10%, ±5%, or ±1% from the measurable value.

[0037] As used herein, the terms “may,” “optionally,” and “may optionally” are used interchangeably and are meant to include cases in which the condition occurs as well as cases in which the condition does not occur.

[0038] The term “nucleic acid” as used herein means a polymer composed of nucleotides, e.g. deoxyribonucleotides or ribonucleotides.

[0039] The terms “ribonucleic acid” and “RNA” as used herein mean a polymer composed of ribonucleotides.

[0040] The terms “deoxyribonucleic acid” and “DNA” as used herein mean a polymer composed of deoxyribonucleotides.

[0041] The term “oligonucleotide” denotes single- or double-stranded nucleotide multimers of from about 2 to up to about 100 nucleotides in length. Suitable oligonucleotides may be prepared by the phosphoramidite method described by Beaucage and Carruthers, Tetrahedron Lett., 22:1859-1862 (1981), or by the triester method according to Matteucci, et al., J. Am. Chem. Soc., 103:3185 (1981), both incorporated herein by reference, or by other chemical methods using either a commercial automated oligonucleotide synthesizer or VLSIPS™ technology. When oligonucleotides are referred to as “double-stranded,” it is understood by those of skill in the art that a pair of oligonucleotides exist in a hydrogen-bonded, helical array typically associated with, for example, DNA. In addition to the 100% complementary form of double-stranded oligonucleotides, the term “double-stranded,” as used herein is also meant to refer to those forms which include such structural features as bulges and loops, described more fully in such biochemistry texts as Stryer, Biochemistry, Third Ed., (1988), incorporated herein by reference for all purposes.

[0042] The terms “polynucleotide”, “nucleotide sequence”, and “nucleic acid sequence” are used interchangeably herein and refer to a single or double stranded polymer composed of nucleotide monomers.

[0043] The term “polypeptide” refers to a compound made up of a single chain of D- or L-amino acids or a mixture of D- and L-amino acids joined by peptide bonds.

[0044] The term “complementary” refers to the topological compatibility or matching together of interacting surfaces of a probe molecule and its target. Thus, the target and its probe can be described as complementary, and furthermore, the contact surface characteristics are complementary to each other.

[0045] The term “hybridization” refers to a process of establishing a non-covalent, sequence-specific interaction between two or more complementary strands of nucleic acids into a single hybrid, which in the case of two strands is referred to as a duplex.

[0046] The term “anneal” refers to the process by which a single-stranded nucleic acid sequence pairs by hydrogen bonds to a complementary sequence, forming a double-stranded nucleic acid sequence, including the reformation (renaturation) of complementary strands that were separated by heat (thermally denatured).

[0047] The term “melting” refers to the denaturation of a double-stranded nucleic acid sequence due to high temperatures, resulting in the separation of the double strand into two single strands by breaking the hydrogen bonds between the strands.

[0048] The term “promoter” or “regulatory element” refers to a region or sequence determinants located upstream or downstream from the start of transcription and which are involved in recognition and binding of RNA polymerase and other proteins to initiate transcription. Promoters need not be of bacterial origin, for example, promoters derived from viruses or from other organisms can be used in the compositions, systems, or methods described herein. The term “regulatory element” is intended to include promoters, enhancers, internal ribosomal entry sites (IRES), and other expression control elements (e.g. transcription termination signals, such as polyadenylation signals and poly-U sequences). Such regulatory elements are described, for example, in Goeddel, Gene Expression Technology: Methods in Enzymology 185, Academic Press, San Diego, Calif. (1990). Regulatory elements include those that direct constitutive expression of a nucleotide sequence in many types of host cell and those that direct expression of the nucleotide sequence only in certain host cells (e.g., tissue-specific regulatory sequences). A tissue-specific promoter may direct expression primarily in a desired tissue of interest, such as muscle, neuron, bone, skin, blood, specific organs (e.g. liver, pancreas), or particular cell types (e.g. lymphocytes). Regulatory elements may also direct expression in a temporal-dependent manner, such as in a cell-cycle dependent or developmental stage-dependent manner, which may or may not also be tissue or cell-type specific. In some embodiments, a vector comprises one or more pol III promoter (e.g. 1, 2, 3, 4, 5, or more pol I promoters), one or more pol II promoters (e.g. 1, 2, 3, 4, 5, or more pol II promoters), one or more pol I promoters (e.g. 1, 2, 3, 4, 5, or more pol I promoters), or combinations thereof. Examples of pol III promoters include, but are not limited to, U6 and H1 promoters. Examples of pol II promoters include, but are not limited to, the retroviral Rous sarcoma virus (RSV) LTR promoter (optionally with the RSV enhancer), the cytomegalovirus (CMV) promoter (optionally with the CMV enhancer) [see, e.g., Boshart et al, Cell, 41:521-530 (1985)], the SV40 promoter, the dihydrofolate reductase promoter, the β-actin promoter, the phosphoglycerol kinase (PGK) promoter, and the EF1α promoter. Also encompassed by the term “regulatory element” are enhancer elements, such as WPRE; CMV enhancers; the R-U5′ segment in LTR of HTLV-I (Mol. Cell. Biol., Vol. 8(1), p. 466-472, 1988); SV40 enhancer; and the intron sequence between exons 2 and 3 of rabbit β-globin (Proc. Natl. Acad. Sci. USA., Vol. 78(3), p. 1527-31, 1981). It will be appreciated by those skilled in the art that the design of the expression vector can depend on such factors as the choice of the host cell to be transformed, the level of expression desired, etc.

[0049] The term “recombinant” refers to a human manipulated nucleic acid (e.g. polynucleotide) or a copy or complement of a human manipulated nucleic acid (e.g. polynucleotide), or if in reference to a protein (i.e, a “recombinant protein”), a protein encoded by a recombinant nucleic acid (e.g. polynucleotide). In embodiments, a recombinant expression cassette comprising a promoter operably linked to a second nucleic acid (e.g. polynucleotide) may include a promoter that is heterologous to the second nucleic acid (e.g. polynucleotide) as the result of human manipulation (e.g., by methods described in Sambrook et al., Molecular Cloning—A Laboratory Manual, Cold Spring Harbor Laboratory, Cold Spring Harbor, N.Y., (1989) or Current Protocols in Molecular Biology Volumes 1-3, John Wiley & Sons, Inc. (1994-1998)). In another example, a recombinant expression cassette may comprise nucleic acids (e.g. polynucleotides) combined in such a way that the nucleic acids (e.g. polynucleotides) are extremely unlikely to be found in nature. For instance, human manipulated restriction sites or plasmid vector sequences may flank or separate the promoter from the second nucleic acid (e.g. polynucleotide). One of skill will recognize that nucleic acids (e.g. polynucleotides) can be manipulated in many ways and are not limited to the examples above.

[0050] The term “expression cassette” refers to a nucleic acid construct, which when introduced into a host cell, results in transcription and/or translation of a RNA or polypeptide, respectively. In embodiments, an expression cassette comprising a promoter operably linked to a second nucleic acid (e.g. polynucleotide) may include a promoter that is heterologous to the second nucleic acid (e.g. polynucleotide) as the result of human manipulation (e.g., by methods described in Sambrook et al., Molecular Cloning—A Laboratory Manual, Cold Spring Harbor Laboratory, Cold Spring Harbor, N.Y., (1989) or Current Protocols in Molecular Biology Volumes 1-3, John Wiley & Sons, Inc. (1994-1998)). In some embodiments, an expression cassette comprising a terminator (or termination sequence) operably linked to a second nucleic acid (e.g. polynucleotide) may include a terminator that is heterologous to the second nucleic acid (e.g. polynucleotide) as the result of human manipulation. In some embodiments, the expression cassette comprises a promoter operably linked to a second nucleic acid (e.g. polynucleotide) and a terminator operably linked to the second nucleic acid (e.g. polynucleotide) as the result of human manipulation. In some embodiments, the expression cassette comprises an endogenous promoter. In some embodiments, the expression cassette comprises an endogenous terminator. In some embodiments, the expression cassette comprises a synthetic (or non-natural) promoter. In some embodiments, the expression cassette comprises a synthetic (or non-natural) terminator.

[0051] The terms “identical” or percent “identity,” in the context of two or more nucleic acids or polypeptide sequences, refer to two or more sequences or subsequences that are the same or have a specified percentage of amino acid residues or nucleotides that are the same (i.e., about 60% identity, preferably 61%, 62%, 63%, 64%, 65%, 66%, 67%, 68%, 69%, 70%, 71%, 72%, 73%, 74%, 75%, 76%, 77%, 78%, 79%, 80%, 81%, 82%, 83%, 84%, 85%, 86%, 87%, 88%, 89%, 90%, 91%, 92%, 93%, 94%, 95%, 96%, 97%, 98%, 99% or higher identity over a specified region when compared and aligned for maximum correspondence over a comparison window or designated region) as measured using a BLAST or BLAST 2.0 sequence comparison algorithms with default parameters described below, or by manual alignment and visual inspection (see, e.g., NCBI web site or the like). Such sequences are then said to be “substantially identical.” This definition also refers to, or may be applied to, the compliment of a test sequence. The definition also includes sequences that have deletions and/or additions, as well as those that have substitutions. As described below, the preferred algorithms can account for gaps and the like. Preferably, identity exists over a region that is at least about 10 amino acids or 20 nucleotides in length, or more preferably over a region that is 10-50 amino acids or 20-50 nucleotides in length. As used herein, percent (%) amino acid sequence identity is defined as the percentage of amino acids in a candidate sequence that are identical to the amino acids in a reference sequence, after aligning the sequences and introducing gaps, if necessary, to achieve the maximum percent sequence identity. Alignment for purposes of determining percent sequence identity can be achieved in various ways that are within the skill in the art, for instance, using publicly available computer software such as BLAST, BLAST-2, ALIGN, ALIGN-2 or Megalign (DNASTAR) software. Appropriate parameters for measuring alignment, including any algorithms needed to achieve maximal alignment over the full-length of the sequences being compared can be determined by known methods.

[0052] For sequence comparisons, typically one sequence acts as a reference sequence, to which test sequences are compared. When using a sequence comparison algorithm, test and reference sequences are entered into a computer, subsequence coordinates are designated, if necessary, and sequence algorithm program parameters are designated. Preferably, default program parameters can be used, or alternative parameters can be designated. The sequence comparison algorithm then calculates the percent sequence identities for the test sequences relative to the reference sequence, based on the program parameters.

[0053] One example of an algorithm that is suitable for determining percent sequence identity and sequence similarity are the BLAST and BLAST 2.0 algorithms, which are described in Altschul et al. (1977) Nuc. Acids Res. 25:3389-3402, and Altschul et al. (1990) J. Mol. Biol. 215:403-410, respectively. Software for performing BLAST analyses is publicly available through the National Center for Biotechnology Information (http://www.ncbi.nlm.nih.gov/). This algorithm involves first identifying high scoring sequence pairs (HSPs) by identifying short words of length W in the query sequence, which either match or satisfy some positive-valued threshold score T when aligned with a word of the same length in a database sequence. T is referred to as the neighborhood word score threshold (Altschul et al. (1990) J. Mol. Biol. 215:403-410). These initial neighborhood word hits act as seeds for initiating searches to find longer HSPs containing them. The word hits are extended in both directions along each sequence for as far as the cumulative alignment score can be increased. Cumulative scores are calculated using, for nucleotide sequences, the parameters M (reward score for a pair of matching residues; always >0) and N (penalty score for mismatching residues; always <0). For amino acid sequences, a scoring matrix is used to calculate the cumulative score. Extension of the word hits in each direction are halted when: the cumulative alignment score falls off by the quantity X from its maximum achieved value; the cumulative score goes to zero or below, due to the accumulation of one or more negative-scoring residue alignments; or the end of either sequence is reached. The BLAST algorithm parameters W, T, and X determine the sensitivity and speed of the alignment. The BLASTN program (for nucleotide sequences) uses as defaults a wordlength (W) of 11, an expectation (E) or 10, M=5, N=−4 and a comparison of both strands. For amino acid sequences, the BLASTP program uses as defaults a wordlength of 3, and expectation (E) of 10, and the BLOSUM62 scoring matrix (see Henikoff and Henikoff (1989) Proc. Natl. Acad. Sci. USA 89:10915) alignments (B) of 50, expectation (E) of 10, M=5, N=−4, and a comparison of both strands.

[0054] The BLAST algorithm also performs a statistical analysis of the similarity between two sequences (see, e.g., Karlin and Altschul (1993) Proc. Natl. Acad. Sci. USA 90:5873-5787). One measure of similarity provided by the BLAST algorithm is the smallest sum probability (P(N)), which provides an indication of the probability by which a match between two nucleotide or amino acid sequences would occur by chance. For example, a nucleic acid is considered similar to a reference sequence if the smallest sum probability in a comparison of the test nucleic acid to the reference nucleic acid is less than about 0.2, more preferably less than about 0.01.

[0055] The phrase “codon optimized” as it refers to genes or coding regions of nucleic acid molecules for the transformation of various hosts, refers to the alteration of codons in the gene or coding regions of polynucleic acid molecules to reflect the typical codon usage of a selected organism without altering the polypeptide encoded by the DNA. Such optimization includes replacing at least one, or more than one, or a significant number, of codons with one or more codons that are more frequently used in the genes of that selected organism.

[0056] Nucleic acid is “operably linked” when it is placed into a functional relationship with another nucleic acid sequence. For example, DNA for a presequence or secretory leader is operably linked to DNA for a polypeptide if it is expressed as a preprotein that participates in the secretion of the polypeptide; a promoter or enhancer is operably linked to a coding sequence if it affects the transcription of the sequence; or a ribosome binding site is operably linked to a coding sequence if it is positioned so as to facilitate translation. Generally, “operably linked” means that the DNA sequences being linked are near each other, and, in the case of a secretory leader, contiguous and in reading phase. However, operably linked nucleic acids (e.g. enhancers and coding sequences) do not have to be contiguous. Linking is accomplished by ligation at convenient restriction sites. If such sites do not exist, the synthetic oligonucleotide adaptors or linkers are used in accordance with conventional practice. In embodiments, a promoter is operably linked with a coding sequence when it is capable of affecting (e.g. modulating relative to the absence of the promoter) the expression of a protein from that coding sequence (i.e., the coding sequence is under the transcriptional control of the promoter).

[0057] The term “variant” or “derivative” as used herein refers to an amino acid sequence derived from the amino acid sequence of the parent protein having one or more amino acid substitutions, insertions, and/or deletions.

### Chimeric Constructs

[0058] In one aspect, disclosed herein is a nucleotide sequence encoding a chimeric polypeptide, comprising: a first nucleotide sequence encoding a light-induced oligomerization domain and a second nucleotide sequence encoding a low complexity domain from a neurodegenerative disease target protein.

[0059] In one aspect, disclosed herein is an expression vector encoding a chimeric polypeptide, comprising: a first nucleotide sequence encoding a light-induced oligomerization domain and a second nucleotide sequence encoding a low complexity domain from a neurodegenerative disease target protein, wherein the first nucleotide sequence is operably linked to a promoter.

[0060] In some embodiments, the expression vector encoding a chimeric polypeptide is comprised in a plasmid or in a virus or viral vector. A plasmid or a viral vector can be capable of extrachromosomal replication or, optionally, can integrate into the host genome. As used herein, the term “integrated” used in reference to an expression vector (e.g., a plasmid or viral vector) means the expression vector, or a portion thereof, is incorporated (physically inserted or ligated) into the chromosomal DNA of a host cell. As used herein, a “viral vector” refers to a virus-like particle containing genetic material which can be introduced into a eukaryotic cell without causing substantial pathogenic effects to the eukaryotic cell. A wide range of viruses or viral vectors can be used for transduction, but should be compatible with the cell type the virus or viral vector are transduced into (e.g., low toxicity, capability to enter cells). Suitable viruses and viral vectors include adenovirus, lentivirus, retrovirus, among others. In some embodiments, the expression vector encoding a chimeric polypeptide is a naked DNA or is comprised in a nanoparticle (e.g., liposomal vesicle, porous silicon nanoparticle, gold-DNA conjugate particle, polyethylenimine polymer particle, cationic peptides, etc.).

[0061] The expression vectors disclosed herein are, in some embodiments, capable of inducing a neurodegenerative disease pathology in a cell (e.g., inducing aggregation of a protein) without substantially altering the expression level of a protein involved in the neurodegenerative disease pathology. For example and without limitation, the expression vector can induce aggregation of a protein having a low complexity domain from a neurodegenerative disease target protein without substantially increasing or decreasing the expression level of an endogenous target protein which comprises the same low complexity domain. As such, a cell comprising a herein disclosed nucleotide sequence encoding a chimeric polypeptide can have substantially unchanged expression levels of an endogenous neurodegenerative disease target protein comprising a low complexity domain, as compared to a cell of the same cell type which does not comprise the nucleotide sequence encoding a chimeric polypeptide. The term “substantially unchanged expression levels,” as used herein, refers to a change in expression level, if any, to a degree not known or not suspected to cause or be associated with inducing a neurodegenerative disease pathology in a cell.

[0062] The expression vectors disclosed herein are, in some embodiments, are capable of inducing a neurodegenerative disease pathology in a cell (e.g., inducing aggregation of a protein) using a wild-type form of a low complexity domain from a neurodegenerative disease target protein. Thus, in some embodiments, the low complexity domain from a neurodegenerative disease target protein does not include a mutation which differs from the wild-type sequence and which is known or suspected to cause or be associated with inducing a neurodegenerative disease pathology in a cell. For example and without limitation, the expression vector can comprise a low complexity domain from a wild-type TDP-43 protein which does not contain a mutation such as Q331K, known to cause or be associated with ALS.

[0063] In one aspect, disclosed herein is a cell comprising a nucleotide sequence encoding a chimeric polypeptide, comprising: a first nucleotide sequence encoding a light-induced oligomerization domain and a second nucleotide sequence encoding a neurodegenerative disease target protein.

[0064] In some embodiments, the cell is a cell which can be affected by a neurodegenerative disease. For example, the cell can be a glial cell or a neuronal cell.

[0065] In one aspect, disclosed herein is a chimeric polypeptide comprising: a light-induced oligomerization domain; and a low complexity domain from a neurodegenerative disease target protein.

[0066] In one embodiment, the light-induced oligomerization domain is selected from the group consisting of CRYPHR, CRY2OLIG, NcVVD, NcVVDY50W, and NcLOV. In one embodiment, the light-induced oligomerization domain is selected from the group consisting of CRYPHR, CRY2OLIG, NcVVD, NcVVDY50W, NcLOV, VfAU1, YtvA, EL222, RsLOV, and AsLOV2. In one embodiment, the light-induced oligomerization domain is selected from the list of domains in Table 2. In one embodiment, the light-induced oligomerization domain is selected from a variant of CRYPHR, CRY2OLIG, NcVVD, NcVVDY50W, NcLOV, VfAU1, YtvA, EL222, RsLOV, or AsLOV2. In one embodiment, the light-induced oligomerization domain is selected from a fragment of CRYPHR, CRY2OLIG, NcVVD, NcVVDY50W, NcLOV, VfAU1, YtvA, EL222, RsLOV, or AsLOV2.

[0067] In one embodiment, the light-induced oligomerization domain is NcVVDY50W. In one embodiment, the light-induced oligomerization domain is CRY2OLIG. In one embodiment, the light-induced oligomerization domain is CRYPHR. In one embodiment, the light-induced oligomerization domain comprises a LOV domain from the VVD protein. In one embodiment, the light-induced oligomerization domain comprises a LOV domain from the LOV protein. In one embodiment, the light-induced oligomerization domain comprises a PHR domain. In one embodiment, the light-induced oligomerization domain comprises a PHR domain, from the CRY2 protein. In one embodiment, the light-induced oligomerization domain is VfAU1. In one embodiment, the light-induced oligomerization domain is YtvA. In one embodiment, the light-induced oligomerization domain is EL222. In one embodiment, the light-induced oligomerization domain is RsLOV. In one embodiment, the light-induced oligomerization domain is AsLOV2.

[0068] In one embodiment, the light-induced oligomerization domain is at least 90% identical to CRYPHR. In one embodiment, the light-induced oligomerization domain is at least 90% identical to NcVVD. In one embodiment, the light-induced oligomerization domain is at least 90% identical to NcVVDY50W. In one embodiment, the light-induced oligomerization domain is at least 90% identical to NcLOV. In one embodiment, the light-induced oligomerization domain is at least 90% identical to CRY2OLIG. In one embodiment, the light-induced oligomerization domain is at least 90% identical to VfAU1. In one embodiment, the light-induced oligomerization domain is at least 90% identical to YtvA. In one embodiment, the light-induced oligomerization domain is at least 90% identical to EL222. In one embodiment, the light-induced oligomerization domain is at least 90% identical to RsLOV. In one embodiment, the light-induced oligomerization domain is at least 90% identical to AsLOV2.

[0069] In some embodiments, the first nucleotide sequence can comprise a nucleotide sequence which encodes a light-induced oligomerization domain selected from the group consisting of CRYPHR, CRY2OLIG, NcVVD, NcVVDY50W, NcLOV, and VfAU1LOV.

[0070] In some embodiments, the first nucleotide sequence can comprise a nucleotide sequence which encodes an amino acid sequence that is at least 70% identical to SEQ ID NO:1, SEQ ID NO:2, SEQ ID NO:3, SEQ ID NO:4, SEQ ID NO:5, SEQ ID NO:92, SEQ ID NO:93, SEQ ID NO:99, SEQ ID NO:100, SEQ ID NO:101, or SEQ ID NO:102. In some embodiments, the first nucleotide sequence can encode an amino acid sequence which is at least 75% identical, at least 80% identical, at least 85% identical, at least 90% identical, at least 95% identical, or at least 99% identical to SEQ ID NO:1, SEQ ID NO:2, SEQ ID NO:3, SEQ ID NO:4, SEQ ID NO:5, SEQ ID NO:92, SEQ ID NO:93, SEQ ID NO:99, SEQ ID NO:100, SEQ ID NO:101, or SEQ ID NO:102. In some embodiments, the first nucleotide sequence can comprise SEQ ID NO:1, SEQ ID NO:2, SEQ ID NO:3, SEQ ID NO:4, SEQ ID NO:5, SEQ ID NO:92, SEQ ID NO:93, SEQ ID NO:99, SEQ ID NO:100, SEQ ID NO:101, or SEQ ID NO:102. In some embodiments, the first nucleotide sequence can comprise SEQ ID NO:94. The nucleotide sequence can be that of the wild type nucleic acid sequence encoding an amino acid sequence disclosed herein. In some embodiments, the nucleotide sequence is modified from the wild type sequence, but due to the degeneracy of the genetic code, can still encode for the same amino acid sequence. In some embodiments, the nucleotide sequence is a variant of one of the sequences disclosed herein (or encodes of variant protein sequence). In some embodiments, the nucleotide sequence is a fragment of one of the nucleic acids herein, or encodes a fragment of one of the amino acids disclosed herein. In some embodiments, the nucleotide sequence is codon optimized (for example, to improve expression).

[0071] In one embodiment, the light-induced oligomerization domain is selected from the group consisting of a CRY2 PHR domain (for example, CRY2 PHR, CRY2OLIG) or a light-oxygen-voltage-sensing (LOV) domain (for example, NcVVD, NcVVDY50W, VfAU1, YtvA, EL222, RsLOV, AsLOV2).

[0072] In one embodiment, the low complexity domain from a neurodegenerative disease target protein is selected from the group consisting of TDP-43, Alpha synuclein, Tau, Fus, TIA1, SOD1, Huntingtin, Ataxin 2, and hnRNPA2B1. In one embodiment, the low complexity domain from a neurodegenerative disease target protein is selected from the group consisting of TDP-43, Alpha synuclein, Tau, Fus, TIA1, SOD1, Huntingtin, Ataxin 2, hnRNPA1, and hnRNPA2B1. In one embodiment, the low complexity domain from a neurodegenerative disease target protein is selected from the group consisting of TDP-43, Alpha synuclein, Tau, Fus, TIA1, SOD1, Huntingtin, Ataxin 2, hnRNPA1, hnRNPA2B1, EWS RNA Binding Protein 1, and TATA box binding protein factor 15. In one embodiment, the low complexity domain from a neurodegenerative disease target protein is selected from a variant of TDP-43, Alpha synuclein, Tau, TIA1, SOD1, Huntingtin, Ataxin 2, hnRNPA1, hnRNPA2B1, EWS RNA Binding Protein 1, or TATA box binding protein factor 15. In one embodiment, the low complexity domain from a neurodegenerative disease target protein is selected from a fragment of TDP-43, Alpha synuclein, Tau, TIA1, SOD1, Huntingtin, Ataxin 2, hnRNPA1, hnRNPA2B1, EWS RNA Binding Protein 1, or TATA box binding protein factor 15. In one embodiment, the fragment of TDP-43, Alpha synuclein, Tau, TIA1, SOD1, Huntingtin, Ataxin 2, hnRNPA1, hnRNPA2B1, EWS RNA Binding Protein 1, or TATA box binding protein factor 15 comprises a low complexity domain (or fragment thereof) within each neurodegenerative disease target protein.

[0073] In one embodiment, the low complexity domain from a neurodegenerative disease target protein is selected from Table 3. In one embodiment, the low complexity domain is from any neurodegenerative disease target protein that aggregates in neurodegenerative diseases.

[0074] In one embodiment, the low complexity domain from a neurodegenerative disease target protein is selected from the group consisting of an amino acid sequence with at least 90% identity to TDP-43, Alpha synuclein, Tau, Fus, TIA1, SOD1, Huntingtin, Ataxin 2, hnRNPA1, hnRNPA2B1, EWS RNA Binding Protein 1, and TATA box binding protein factor 15. In one embodiment, the low complexity domain from a neurodegenerative disease target protein is selected from the group consisting of an amino acid sequence with at least 90% identity to a low complexity domain from a neurodegenerative disease target protein is selected from Table 3. In one embodiment, the low complexity domain from a neurodegenerative disease target protein is selected from an orthologue of the group consisting of TDP-43, Alpha synuclein, Tau, Fus, TIA1, SOD1, Huntingtin, Ataxin 2, hnRNPA1, hnRNPA2B1, EWS RNA Binding Protein 1, and TATA box binding protein factor 15.

[0075] In one embodiment, the low complexity domain from a neurodegenerative disease target protein is selected from the group consisting of an amino acid sequence with at least 60% (for example, at least 60%, at least 70%, at least 80%, at least 90%, at least 95%) identity to TDP-43, Alpha synuclein, Tau, Fus, TIA1, SOD1, Huntingtin, Ataxin 2, hnRNPA1, hnRNPA2B1, EWS RNA Binding Protein 1, and TATA box binding protein factor 15 (or a fragment thereof).

[0076] In one embodiment, the low complexity domain from a neurodegenerative disease target protein is TDP-43. In one embodiment, the low complexity domain from a neurodegenerative disease target protein is Alpha synuclein. In one embodiment, the low complexity domain from a neurodegenerative disease target protein is Tau. In one embodiment, the low complexity domain from a neurodegenerative disease target protein is Fus. In one embodiment, the low complexity domain from a neurodegenerative disease target protein is TIA1. In one embodiment, the low complexity domain from a neurodegenerative disease target protein is SOD1. In one embodiment, the low complexity domain from a neurodegenerative disease target protein is Huntingtin. In one embodiment, the low complexity domain from a neurodegenerative disease target protein is Ataxin 2. In one embodiment, the low complexity domain from a neurodegenerative disease target protein is hnRNPA1. In one embodiment, the low complexity domain from a neurodegenerative disease target protein is hnRNPA2B1. In one embodiment, the low complexity domain from a neurodegenerative disease target protein is EWS RNA Binding Protein 1. In one embodiment, the low complexity domain from a neurodegenerative disease target protein is TATA box binding protein factor 15.

[0077] In one embodiment, a VVD light-induced oligomerization domain is fused to a low complexity domain of TDP-43. In one embodiment, a VVD light-induced oligomerization is fused to full length TDP-43 (comprising a low complexity domain). In one embodiment, a light-induced oligomerization domain is fused to a low complexity domain from any neurodegenerative disease target protein that aggregates in neurodegenerative diseases.

[0078] In one embodiment, a light-induced oligomerization domain is fused to a low complexity domain of TDP-43, wherein the sequence of the low complexity domain of TDP-43 comprises SEQ ID NO:95, SEQ ID NO:96, SEQ ID NO:97, or SEQ ID NO:98 (or a fragment thereof).

[0079] In one embodiment, the nucleotide sequence encoding the chimeric polypeptide may further comprise a third nucleotide sequence encoding a reporter protein such as a fluorescent protein (to allow visualization of the protein aggregates by fluorescence). In one embodiment, the fluorescent protein is mCherry (mCh). In some embodiments, the fluorescent protein is GFP or YFP. In some embodiments, the first nucleotide sequence can encode a light-induced oligomerization domain comprising a PHR domain of the Arabidopsis Cryptochrome 2 protein (e.g., CRYPHR). In some embodiments, the light-induced oligomerization domain can comprise a wild-type CRYPHR amino acid sequence as disclosed, for example, in SEQ ID NO:1, or optionally, can comprise a mutated CRYPHR amino acid sequence as disclosed, for example, in SEQ ID NO:2. In some embodiments, a mutated CRYPHR amino acid sequence can comprise a E490G mutation, which can increase efficiency of clustering upon blue light stimulation as compared to a wild-type CRYPHR amino acid sequence. In some embodiments, the first nucleotide sequence can encode a light-induced oligomerization domain, wherein the light-induced oligomerization domain comprises a polypeptide sequence which is at least 70% identical to SEQ ID NO:1 or SEQ ID NO:2. In some embodiments, the first nucleotide sequence can encode a light-induced oligomerization domain, wherein the light-induced oligomerization domain comprises a polypeptide sequence which is at least 75% identical, at least 80% identical, at least 85% identical, at least 90% identical, at least 95% identical, or at least 99% identical to SEQ ID NO:1 or SEQ ID NO:2. In some embodiments, the first nucleotide sequence can encode a light-induced oligomerization domain comprising the polypeptide sequence of SEQ ID NO:1 or SEQ ID NO:2.

[0080] In some embodiments, the first nucleotide sequence can encode a light-induced oligomerization domain comprising Light-Oxygen-Voltage-Sensing Domain (LOV) from Neurospora Vivid protein (e.g., LOV, NcVVD, NcVVDY50W, NcLOV, VfAU1, YtvA, EL222, RsLOV, and/or AsLOV2). In some embodiments, the light-induced oligomerization domain can comprise a wild-type LOV amino acid sequence as disclosed, for example, in SEQ ID NO:3, SEQ ID NO:4, SEQ ID NO:92, SEQ ID NO:93, SEQ ID NO:99, SEQ ID NO:100, SEQ ID NO:101, or SEQ ID NO:102, or optionally, can comprise a mutated LOV amino acid sequence as disclosed, for example, in SEQ ID NO:5. In some embodiments, a mutated LOV amino acid sequence can comprise a Y50W mutation, which can reduce the rate of dissipation from a dimerized state as compared to a wild-type LOV amino acid sequence. In some embodiments, the first nucleotide sequence can encode a light-induced oligomerization domain, wherein the light-induced oligomerization domain comprises a polypeptide sequence which is at least 70% identical to SEQ ID NO:3, SEQ ID NO:4, SEQ ID NO:5, SEQ ID NO:92, SEQ ID NO:93, SEQ ID NO:99, SEQ ID NO:100, SEQ ID NO:101, or SEQ ID NO:102. In some embodiments, the first nucleotide sequence can encode a light-induced oligomerization domain, wherein the light-induced oligomerization domain comprises a polypeptide sequence which is at least 75% identical, at least 80% identical, at least 85% identical, at least 90% identical, at least 95% identical, or at least 99% identical to SEQ ID NO:3, SEQ ID NO:4, SEQ ID NO:5, SEQ ID NO:92, SEQ ID NO:93, SEQ ID NO:99, SEQ ID NO:100, SEQ ID NO:101, or SEQ ID NO:102. In some embodiments, the first nucleotide sequence can encode a light-induced oligomerization domain comprising the polypeptide sequence of SEQ ID NO:3, SEQ ID NO:4, SEQ ID NO:5, SEQ ID NO:92, SEQ ID NO:93, SEQ ID NO:99, SEQ ID NO:100, SEQ ID NO:101, or SEQ ID NO:102.

[0081] In some embodiments, the first nucleotide sequence can encode a light-induced oligomerization domain comprising a PHR domain of the Arabidopsis Cryptochrome 2 protein (e.g., CRYPHR), and the second nucleotide sequence can encode a low complexity domain from a neurodegenerative disease target protein. In some embodiments, the first nucleotide sequence can encode a light-induced oligomerization domain comprising a PHR domain of the Arabidopsis Cryptochrome 2 protein (e.g., CRYPHR), and the second nucleotide sequence can encode a low complexity domain from a neurodegenerative disease target protein comprising TDP-43. In some embodiments, the second nucleotide sequence can encode a low complexity domain from a neurodegenerative disease target protein comprising full-length TDP-43 (e.g., SEQ ID NO:6 or SEQ ID NO:7). In some embodiments, the second nucleotide sequence can encode a low complexity domain from a neurodegenerative disease target protein comprising truncated TDP-43 (e.g., SEQ ID NO:8, SEQ ID NO:9, SEQ ID NO:10, SEQ ID NO:11, SEQ ID NO:12, or SEQ ID NO:13). In some embodiments, a truncated TDP-43 comprises or consists of amino acids 105-414, 191-414, or 274-414 of the full-length TDP-43 amino acid sequence. Thus, in some embodiments, the first nucleotide sequence can encode a light-induced oligomerization domain comprising CRYPHR, and the second nucleotide sequence can encode a low complexity domain from a neurodegenerative disease target protein comprising full-length or truncated TDP-43, wherein the first nucleotide sequence and the second nucleotide sequence encode a chimeric polypeptide sequence which is at least 75% identical, at least 80% identical, at least 85% identical, at least 90% identical, at least 95% identical, or at least 99% identical to SEQ ID NO:6, SEQ ID NO:7, SEQ ID NO:8, SEQ ID NO:9, SEQ ID NO:10, SEQ ID NO:11, SEQ ID NO:12, or SEQ ID NO:13. In some embodiments, the first nucleotide sequence and the second nucleotide sequence encode a chimeric polypeptide sequence according to SEQ ID NO:6, SEQ ID NO:7, SEQ ID NO:8, SEQ ID NO:9, SEQ ID NO:10, SEQ ID NO:11, SEQ ID NO:12, or SEQ ID NO:13. In some embodiments, SEQ ID NO:6 is selected. In some embodiments, SEQ ID NO:11 is selected.

[0082] In some embodiments, a nucleotide sequence encoding a chimeric polypeptide comprising a first nucleotide sequence and a second nucleotide sequence can further contain a third nucleotide sequence encoding a reporter protein or fragment thereof (e.g., a fluorescent protein such as mCherry, also referred to as mCH). Thus, in some embodiments, a first nucleotide sequence can encode a light-induced oligomerization domain comprising CRYPHR, a second nucleotide sequence can encode a low complexity domain from a neurodegenerative disease target protein comprising full-length or truncated TDP-43, and a third nucleotide sequence can encode a mCherry protein, wherein the first, second, and third nucleotide sequences encode a chimeric polypeptide sequence which is at least 75% identical, at least 80% identical, at least 85% identical, at least 90% identical, at least 95% identical, or at least 99% identical to SEQ ID NO:14, SEQ ID NO:15, SEQ ID NO:16, SEQ ID NO:17, SEQ ID NO:18, SEQ ID NO:19, SEQ ID NO:20, SEQ ID NO:21, SEQ ID NO:22, SEQ ID NO:23, SEQ ID NO:24, or SEQ ID NO:25. In some embodiments, the first, second, and third nucleotide sequences encode a chimeric polypeptide sequence according to SEQ ID NO:14, SEQ ID NO:15, SEQ ID NO:16, SEQ ID NO:17, SEQ ID NO:18, SEQ ID NO:19, SEQ ID NO:20, SEQ ID NO:21, SEQ ID NO:22, SEQ ID NO:23, SEQ ID NO:24, or SEQ ID NO:25. In some embodiments, SEQ ID NO:14 is selected. In some embodiments, SEQ ID NO:23 is selected.

[0083] In some embodiments, the first nucleotide sequence can encode a light-induced oligomerization domain comprising a LOV photoreceptor domain (e.g., NcVVD, NcVVDY50W, NcLOV, VfAU1, YtvA, EL222, RsLOV, and AsLOV2), and the second nucleotide sequence can encode a low complexity domain from a neurodegenerative disease target protein. In some embodiments, the first nucleotide sequence can encode a light-induced oligomerization domain comprising a LOV photoreceptor domain (e.g., NcVVD, NcVVDY50W, NcLOV, VfAU1, YtvA, EL222, RsLOV, and AsLOV2), and the second nucleotide sequence can encode a low complexity domain from a neurodegenerative disease target protein comprising TDP-43. In some embodiments, the second nucleotide sequence can encode a low complexity domain from a neurodegenerative disease target protein comprising full-length TDP-43 (e.g., SEQ ID NO:26 or SEQ ID NO:27). In some embodiments, the second nucleotide sequence can encode a low complexity domain from a neurodegenerative disease target protein comprising truncated TDP-43 (e.g., SEQ ID NO:28, SEQ ID NO:29, SEQ ID NO:30, SEQ ID NO:31, SEQ ID NO:32, or SEQ ID NO:33). In some embodiments, a truncated TDP-43 consists of amino acids 105-414, 191-414, or 274-414 of the full-length TDP-43 amino acid sequence. Thus, in some embodiments, the first nucleotide sequence can encode a light-induced oligomerization domain comprising NcVVDY50W, and the second nucleotide sequence can encode a low complexity domain from a neurodegenerative disease target protein comprising full-length or truncated TDP-43, wherein the first nucleotide sequence and the second nucleotide sequence encode a chimeric polypeptide sequence which is at least 75% identical, at least 80% identical, at least 85% identical, at least 90% identical, at least 95% identical, or at least 99% identical to SEQ ID NO:26, SEQ ID NO:27, SEQ ID NO:28, SEQ ID NO:29, SEQ ID NO:30, SEQ ID NO:31, SEQ ID NO:32, or SEQ ID NO:33. In some embodiments, the first nucleotide sequence and the second nucleotide sequence encode a chimeric polypeptide sequence according to SEQ ID NO:26, SEQ ID NO:27, SEQ ID NO:28, SEQ ID NO:29, SEQ ID NO:30, SEQ ID NO:31, SEQ ID NO:32, or SEQ ID NO:33.

[0084] In some embodiments, a nucleotide sequence encoding a chimeric polypeptide comprising a first nucleotide sequence and a second nucleotide sequence can further contain a third nucleotide sequence encoding a reporter protein or fragment thereof (e.g., a fluorescent protein such as mCherry). Thus, in some embodiments, a first nucleotide sequence can encode a light-induced oligomerization domain comprising NcVVDY50W, a second nucleotide sequence can encode a low complexity domain from a neurodegenerative disease target protein comprising full-length or truncated TDP-43, and a third nucleotide sequence can encode a mCherry protein, wherein the first, second, and third nucleotide sequences encode a chimeric polypeptide sequence which is at least 75% identical, at least 80% identical, at least 85% identical, at least 90% identical, at least 95% identical, or at least 99% identical to SEQ ID NO:34, SEQ ID NO:35, SEQ ID NO:36, SEQ ID NO:37, SEQ ID NO:38, SEQ ID NO:39, SEQ ID NO:40, or SEQ ID NO:41. In some embodiments, the first, second, and third nucleotide sequences encode a chimeric polypeptide sequence according to SEQ ID NO:34, SEQ ID NO:35, SEQ ID NO:36, SEQ ID NO:37, SEQ ID NO:38, SEQ ID NO:39, SEQ ID NO:40, or SEQ ID NO:41. In some embodiments, SEQ ID NO:34 is selected. In some embodiments, SEQ ID NO:41 is selected.

[0085] In some embodiments, the first nucleotide sequence can encode a light-induced oligomerization domain comprising a PHR domain of the Arabidopsis Cryptochrome 2 protein (e.g., CRY2OLIG), and the second nucleotide sequence can encode a low complexity domain from a neurodegenerative disease target protein comprising α-synuclein. Thus, in some embodiments, the first nucleotide sequence can encode a light-induced oligomerization domain comprising CRY2OLIG, and the second nucleotide sequence can encode a low complexity domain from a neurodegenerative disease target protein comprising α-synuclein, wherein the first nucleotide sequence and the second nucleotide sequence encode a chimeric polypeptide sequence which is at least 75% identical, at least 80% identical, at least 85% identical, at least 90% identical, at least 95% identical, or at least 99% identical to SEQ ID NO:42 or SEQ ID NO:43. In some embodiments, the first nucleotide sequence and the second nucleotide sequence encode a chimeric polypeptide sequence according to SEQ ID NO:42 or SEQ ID NO:43.

[0086] In some embodiments, a nucleotide sequence encoding a chimeric polypeptide comprising a first nucleotide sequence and a second nucleotide sequence can further contain a third nucleotide sequence encoding a reporter protein or fragment thereof (e.g., a fluorescent protein such as mCherry). Thus, in some embodiments, a first nucleotide sequence can encode a light-induced oligomerization domain comprising CRY2OLIG, a second nucleotide sequence can encode a low complexity domain from a neurodegenerative disease target protein comprising α-synuclein, and a third nucleotide sequence can encode a mCherry protein, wherein the first, second, and third nucleotide sequences encode a chimeric polypeptide sequence which is at least 75% identical, at least 80% identical, at least 85% identical, at least 90% identical, at least 95% identical, or at least 99% identical to SEQ ID NO:44, SEQ ID NO:45, or SEQ ID NO:46. In some embodiments, the first, second, and third nucleotide sequences encode a chimeric polypeptide sequence according to SEQ ID NO:44, SEQ ID NO:45, or SEQ ID NO:46. In some embodiments, SEQ ID NO:44 is selected.

[0087] In some embodiments, the first nucleotide sequence can encode a light-induced oligomerization domain comprising a LOV photoreceptor domain (e.g., NcVVD, NcVVDY50W, NcLOV, VfAU1, YtvA, EL222, RsLOV, and AsLOV2), and the second nucleotide sequence can encode a low complexity domain from a neurodegenerative disease target protein comprising α-synuclein. Thus, in some embodiments, the first nucleotide sequence can encode a light-induced oligomerization domain comprising NcVVDY50W, and the second nucleotide sequence can encode a low complexity domain from a neurodegenerative disease target protein comprising α-synuclein, wherein the first nucleotide sequence and the second nucleotide sequence encode a chimeric polypeptide sequence which is at least 75% identical, at least 80% identical, at least 85% identical, at least 90% identical, at least 95% identical, or at least 99% identical to SEQ ID NO:47 or SEQ ID NO:48. In some embodiments, the first nucleotide sequence and the second nucleotide sequence encode a chimeric polypeptide sequence according to SEQ ID NO:47 or SEQ ID NO:48.

[0088] In some embodiments, a nucleotide sequence encoding a chimeric polypeptide comprising a first nucleotide sequence and a second nucleotide sequence can further contain a third nucleotide sequence encoding a reporter protein or fragment thereof (e.g., a fluorescent protein such as mCherry). Thus, in some embodiments, a first nucleotide sequence can encode a light-induced oligomerization domain comprising NcVVDY50W, a second nucleotide sequence can encode a low complexity domain from a neurodegenerative disease target protein comprising α-synuclein, and a third nucleotide sequence can encode a mCherry protein, wherein the first, second, and third nucleotide sequences encode a chimeric polypeptide sequence which is at least 75% identical, at least 80% identical, at least 85% identical, at least 90% identical, at least 95% identical, or at least 99% identical to SEQ ID NO:49, SEQ ID NO:50, or SEQ ID NO:51. In some embodiments, the first, second, and third nucleotide sequences encode a chimeric polypeptide sequence according to SEQ ID NO:49, SEQ ID NO:50, or SEQ ID NO:51. In some embodiments, SEQ ID NO:51 is selected.

[0089] In some embodiments, the first nucleotide sequence is positioned upstream of the second nucleotide sequence. In some embodiments, the first nucleotide sequence is positioned downstream of the second nucleotide sequence.

[0090] In some embodiments, where the sequences disclosed herein contain a methionine at the start of the protein, the protein without the methionine is also disclosed. In some embodiments, where the sequences disclosed herein do not contain a methionine at the start of the protein, the protein with the methionine at the start of the protein is also disclosed.

[0091] In some embodiments, the nucleotide sequence encoding a chimeric polypeptide comprises a sequence selected from SEQ ID NO:52, SEQ ID NO:53, SEQ ID NO:54, SEQ ID NO:55, SEQ ID NO:56, SEQ ID NO:57, SEQ ID NO:58, SEQ ID NO:59, SEQ ID NO:60, SEQ ID NO:61, SEQ ID NO:62, SEQ ID NO:63, SEQ ID NO:64, SEQ ID NO:65, SEQ ID NO: 66, SEQ ID NO:67, SEQ ID NO:68, SEQ ID NO:69, SEQ ID NO:70, SEQ ID NO:61, SEQ ID NO:62, SEQ ID NO:63, SEQ ID NO:64, SEQ ID NO:65, SEQ ID NO:66, SEQ ID NO:67, SEQ ID NO:68, SEQ ID NO:69, SEQ ID NO:70, SEQ ID NO:71, SEQ ID NO:72, SEQ ID NO:73, SEQ ID NO:74, SEQ ID NO:75, SEQ ID NO:76, SEQ ID NO:77, SEQ ID NO:78, SEQ ID NO:79, SEQ ID NO:80, SEQ ID NO:81, SEQ ID NO:82, SEQ ID NO:83, SEQ ID NO:84, SEQ ID NO:85, SEQ ID NO:86, SEQ ID NO:87, SEQ ID NO:88, SEQ ID NO:89, SEQ ID NO:90, or SEQ ID NO:91.

### Methods

[0092] In one aspect, disclosed herein is a method of inducing a neurodegenerative disease pathology in a cell, comprising the steps:

introducing into the cell an expression vector encoding a chimeric polypeptide, comprising:
[0093] a first nucleotide sequence encoding a light-induced oligomerization domain and a second nucleotide sequence encoding a low complexity domain from a neurodegenerative disease target protein, wherein the first nucleotide sequence is operably linked to a promoter;
   expressing the chimeric polypeptide; and
   inducing oligomerization of the chimeric polypeptide by stimulation with blue light.

[0094] In another aspect, disclosed herein is a method of screening for an agent that modulates protein aggregation, comprising the steps:

introducing into a cell an expression vector encoding a chimeric polypeptide, comprising:
[0095] a first nucleotide sequence encoding a light-induced oligomerization domain and a second nucleotide sequence encoding a low complexity domain from a neurodegenerative disease target protein, wherein the first nucleotide sequence is operably linked to a promoter;
   expressing the chimeric polypeptide;
   introducing the agent into a culture media comprising the cell;
   inducing oligomerization of the chimeric polypeptide by stimulation with blue light; and
   determining modulation of protein aggregation by the agent.

[0096] In one embodiment, the light-induced oligomerization domain is selected from the group consisting of a CRY2 PHR domain (for example, CRY2 PHR, CRY2OLIG) or a light-oxygen-voltage-sensing (LOV) domain (for example, NcVVD, NcVVDY50W, VfAU1, YtvA, EL222, RsLOV, AsLOV2).

[0097] In one embodiment, the light-induced oligomerization domain is selected from the group consisting of CRYPHR, CRY2OLIG, NcVVD, NcVVDY50W, and NcLOV. In one embodiment, the light-induced oligomerization domain is selected from the group consisting of CRYPHR, CRY2OLIG, NcVVD, NcVVDY50W, NcLOV, VfAU1, YtvA, EL222, RsLOV, and AsLOV2. In one embodiment, the light-induced oligomerization domain is selected from the list of domains in Table 2. In one embodiment, the light-induced oligomerization domain is selected from a variant of CRYPHR, CRY2OLIG, NcVVD, NcVVDY50W, NcLOV, VfAU1, YtvA, EL222, RsLOV, or AsLOV2. In one embodiment, the light-induced oligomerization domain is selected from a fragment of CRYPHR, CRY2OLIG, NcVVD, NcVVDY50W, NcLOV, VfAU1, YtvA, EL222, RsLOV, or AsLOV2.

[0098] In one embodiment, the light-induced oligomerization domain is NcVVDY50W. In one embodiment, the light-induced oligomerization domain is CRY2OLIG. In one embodiment, the light-induced oligomerization domain is CRYPHR. In one embodiment, the light-induced oligomerization domain comprises a LOV domain from the VVD protein. In one embodiment, the light-induced oligomerization domain comprises a LOV domain from the LOV protein. In one embodiment, the light-induced oligomerization domain comprises a PHR domain. In one embodiment, the light-induced oligomerization domain comprises a PHR domain, from the CRY2 protein. In one embodiment, the light-induced oligomerization domain is VfAU1. In one embodiment, the light-induced oligomerization domain is YtvA. In one embodiment, the light-induced oligomerization domain is EL222. In one embodiment, the light-induced oligomerization domain is RsLOV. In one embodiment, the light-induced oligomerization domain is AsLOV2.

[0099] In one embodiment, the low complexity domain from a neurodegenerative disease target protein is selected from the group consisting of TDP-43, Alpha synuclein, Tau, Fus, TIA1, SOD1, Huntingtin, Ataxin 2, hnRNPA1, and hnRNPA2B1. In one embodiment, the low complexity domain from a neurodegenerative disease target protein is selected from the group consisting of TDP-43, Alpha synuclein, Tau, Fus, TIA1, SOD1, Huntingtin, Ataxin 2, hnRNPA1, hnRNPA2B1, EWS RNA Binding Protein 1, and TATA box binding protein factor 15. In one embodiment, the low complexity domain from a neurodegenerative disease target protein is selected from a variant of TDP-43, Alpha synuclein, Tau, TIA1, SOD1, Huntingtin, Ataxin 2, hnRNPA1, hnRNPA2B1, EWS RNA Binding Protein 1, or TATA box binding protein factor 15. In one embodiment, the low complexity domain from a neurodegenerative disease target protein is selected from a fragment of TDP-43, Alpha synuclein, Tau, TIA1, SOD1, Huntingtin, Ataxin 2, hnRNPA1, hnRNPA2B1, EWS RNA Binding Protein 1, or TATA box binding protein factor 15. In one embodiment, the fragment of TDP-43, Alpha synuclein, Tau, TIA1, SOD1, Huntingtin, Ataxin 2, hnRNPA1, hnRNPA2B1, EWS RNA Binding Protein 1, or TATA box binding protein factor 15 comprises the low complexity domain within each neurodegenerative disease target protein.

[0100] In one embodiment, the low complexity domain from a neurodegenerative disease target protein is selected from Table 3. In one embodiment, the low complexity domain is from any neurodegenerative disease target protein that aggregates in neurodegenerative diseases.

[0101] In one embodiment, the low complexity domain from a neurodegenerative disease target protein is selected from the group consisting of an amino acid sequence with at least 90% identity to TDP-43, Alpha synuclein, Tau, Fus, TIA1, SOD1, Huntingtin, Ataxin 2, hnRNPA1, hnRNPA2B1, EWS RNA Binding Protein 1, and TATA box binding protein factor 15. In one embodiment, the low complexity domain from a neurodegenerative disease target protein is selected from the group consisting of an amino acid sequence with at least 90% identity to a low complexity domain from a neurodegenerative disease target protein is selected from Table 3. In one embodiment, the low complexity domain from a neurodegenerative disease target protein is selected from an orthologue of the group consisting of TDP-43, Alpha synuclein, Tau, Fus, TIA1, SOD1, Huntingtin, Ataxin 2, hnRNPA1, hnRNPA2B1, EWS RNA Binding Protein 1, and TATA box binding protein factor 15.

[0102] In one embodiment, the low complexity domain from a neurodegenerative disease target protein is selected from the group consisting of an amino acid sequence with at least 60% (for example, at least 60%, at least 70%, at least 80%, at least 90%, at least 95%) identity to TDP-43, Alpha synuclein, Tau, Fus, TIA1, SOD1, Huntingtin, Ataxin 2, hnRNPA1, hnRNPA2B1, EWS RNA Binding Protein 1, and TATA box binding protein factor 15 (or a fragment thereof).

[0103] In one embodiment, the low complexity domain from a neurodegenerative disease target protein is TDP-43. In one embodiment, the low complexity domain from a neurodegenerative disease target protein is Alpha synuclein. In one embodiment, the low complexity domain from a neurodegenerative disease target protein is Tau. In one embodiment, the low complexity domain from a neurodegenerative disease target protein is Fus. In one embodiment, the low complexity domain from a neurodegenerative disease target protein is TIA1. In one embodiment, the low complexity domain from a neurodegenerative disease target protein is SOD1. In one embodiment, the low complexity domain from a neurodegenerative disease target protein is Huntingtin. In one embodiment, the low complexity domain from a neurodegenerative disease target protein is Ataxin 2. In one embodiment, the low complexity domain from a neurodegenerative disease target protein is hnRNPA1. In one embodiment, the low complexity domain from a neurodegenerative disease target protein is hnRNPA2B1. In one embodiment, the low complexity domain from a neurodegenerative disease target protein is EWS RNA Binding Protein 1. In one embodiment, the low complexity domain from a neurodegenerative disease target protein is TATA box binding protein factor 15.

[0104] In one embodiment, the cell is a mammalian cell. In one embodiment, the cell is a human cell. In one embodiment, the cell is selected from the group consisting of yeast, insect, avian, fish, worm, amphibian, Xenopus, bacteria, algae and mammalian cells. In one embodiment, disclosed herein is a non-human transgenic organism, wherein the organism is an insect, fish, bird, worm, amphibian, Xenopus, or non-human mammal.

[0105] To induce a neurodegenerative disease pathology refers to the action of bringing about the neurodegenerative disease pathology, or increasing the phenotype, symptoms, or severity of the neurodegenerative disease pathology, as compared to refraining from performing the selected action.

[0106] The neurodegenerative disease pathology can include an array of pathologies known to be or suspected to be associated with any one or more neurodegenerative diseases. Examples of such pathologies include, but are not limited to, protein aggregation in the cytoplasm of a cell, mislocalization of nuclear proteins to, for example, the cytoplasm, increased expression of ubiquitin, cell degeneration and/or death, extracellular Amyloid Beta (Aβ) aggregation, and/or intracellular and/or cytoplasmic aggregation of Tau protein. Protein aggregates can, in some embodiments, be colocalized with p62 protein, can be hyper-phosphorylated, can include endogenous protein comprising the low complexity domain from a neurodegenerative disease target protein (e.g., endogenous TDP-43), or combinations thereof.

[0107] Increased ubiquitination or increased expression of ubiquitin can be a phenotypic feature of neurodegenerative diseases. Ubiquitin has numerous cellular roles, including “tagging” proteins (e.g., by covalent linkage) for degradation in a proteasome. Increased ubiquitin expression in a cell is typically compared to a control. In some embodiments, a cell having increased ubiquitin has at least 50% increased ubiquitin expression compared to a control. In some embodiments, a cell having increased ubiquitin has at least 60%, at least 70%, at least 80%, at least 90%, at least 95%, at least 98%, or at least 99% increased ubiquitin expression compared to a control.

[0108] Ubiquitin expression in a cell can be determined at the transcriptional level, the translational level, or combinations thereof, and can be measured via a wide array of methods used to measure gene or polypeptide expression levels. In some embodiments, ubiquitin expression can be measured at the gene transcription level. For example and without limitation, levels of ubiquitin mRNA transcripts can be determined by radiation absorbance (e.g., ultraviolet light absorption at 260, 280, or 230 nm), quantification of fluorescent dye or tag emission (e.g., ethidium bromide intercalation), quantitative polymerase chain reaction (qPCR) of cDNA produced from mRNA transcripts, southern blot analysis, gene expression microarray, or other suitable methods. Increased levels of mRNA transcripts can be used to infer or estimate increased levels of polypeptide expression. In some embodiments, ubiquitin expression can be measured at the post-translational level. For example and without limitation, levels of ubiquitin polypeptide can be determined by radiation absorbance (e.g., ultraviolet light), bicinchoninic acid (BCA) assay, Bradford assay, biuret test, Lowry method, Coomassie-blue staining, functional or enzymatic assay, immunodetection methods and/or Western blot analysis, or other suitable methods.

[0109] As used herein, the term “introducing,” “introduce,” and grammatical variations thereof, as it relates to introducing an expression vector into a cell, refers to any method suitable for transferring the expression vector into the cell. The term includes as examples, but is not limited to, conjugation, transformation/transfection (e.g., divalent cation exposure, heat shock, electroporation), nuclear microinjection, incubation with calcium phosphate polynucleotide precipitate, high velocity bombardment with polynucleotide-coated microprojectiles (e.g., via gene gun), lipofection, cationic polymer complexation (e.g., DEAE-dextran, polyethylenimine), dendrimer complexation, mechanical deformation of cell membranes (e.g., cell-squeezing), sonoporation, optical transfection, impalefection, hydrodynamic polynucleotide delivery, Agrobacterium-mediated transformation, transduction (e.g., transduction with a virus or viral vector), natural or artificial competence, protoplast fusion, magnetofection, nucleofection, or combinations thereof. An introduced expression vector, or a polynucleotide therefrom, can be genetically integrated or exist extrachromosomally.

[0110] A range of blue light wavelengths can be used in the disclosed methods. In one embodiment, the blue light has a wavelength from about 400 nm to about 500 nm. In one embodiment, the blue light has a wavelength from about 405 nm to about 499 nm. In one embodiment, the blue light has a wavelength from about 420 nm to about 490 nm. In one embodiment, the blue light has a wavelength from about 450 nm to about 490 nm. In one embodiment, the blue light has a wavelength from about 460 nm to about 495 nm. In one embodiment, the blue light has a wavelength of about 488 nm. In one embodiment, the blue light has a wavelength of about 475 nm. In one embodiment, the blue light has a wavelength of about 465 nm.

[0111] In one embodiment, the blue light has a wavelength of about 405 nm, about 410 nm, about 415 nm, about 420 nm, about 425 nm, about 430 nm, about 435 nm, about 440 nm, about 445 nm, about 450 nm, about 455 nm, about 460 nm, about 465 nm, about 470 nm, about 475 nm, about 480 nm, about 485 nm, about 490 nm, about 495 nm, or about 500 nm.

[0112] The methods can include various degrees of blue light stimulation. In some embodiments, the stimulation is acute or, optionally, chronic. Acute stimulation refers stimulation with pulses of blue light from about 0.2 to about 60 seconds, wherein the wavelength of the blue light can be any herein disclosed blue light wavelength. In some embodiments, the acute stimulation includes pulses of blue light from about 0.5 second to about 30 seconds, from about 1 second to about 20 seconds, or about 5 seconds. The blue light can be provided by a blue light source or a broad-spectrum light source filtered for the disclosed wavelengths.

[0113] In some embodiments, acute stimulation can result in temporary aggregation of a light-induced oligomerization domain (e.g., cytoplasmic prion-like domains/LCD/IDD protein fragments). Temporary aggregation, in some embodiments, includes protein aggregation observable by the herein disclosed methods for less than about twenty minutes or, optionally, less than about fifteen minutes, less than about ten minutes, or about five minutes or less. In some embodiments, acute stimulation does not result in aggregation of cytoplasmic prion-like domains/LCD/IDD protein fragments for twenty minutes or more.

[0114] In some embodiments, acute stimulation can result in aggregation of a light-induced oligomerization domain which is shorter in duration than aggregation of a light-induced oligomerization domain fused with a low complexity domain from a neurodegenerative disease target protein. In some embodiments, acute stimulation can result in aggregation of a light-induced oligomerization domain fused with a low complexity domain from a neurodegenerative disease target protein which is shorter in duration than aggregation of the same protein having an amino acid mutation known to cause or be associated with a neurodegenerative disease (e.g., TDP-43 Q331K).

[0115] Chronic stimulation is defined by exposure to blue light having a wavelength from about 400 nm to about 500 nm for a duration of about 1 minute or longer (for example, at least 1 minute, at least 5 minutes, at least 10 minutes, at least 30 minutes, at least 60 minutes, at least 2 hours, at least 4 hours, at least 8 hours, at least 12 hours, at least 24 hours, at least 36 hours, or more) from about 0.1 mW/cm² to 8 mW/cm² (within 400 nm-500 nm wavelength).

[0116] The methods disclosed herein can, in some embodiments, induce a neurodegenerative disease pathology in a cell (e.g., aggregation of a protein) without substantially altering the expression level of a protein involved in the neurodegenerative disease pathology. For example and without limitation, the methods can induce aggregation of a chimeric polypeptide comprising TDP-43 (which can include aggregation of endogenous TDP-43) without substantially increasing or decreasing the expression level of endogenous TDP-43. In some or further embodiments, the methods can induce a neurodegenerative disease pathology in a cell using a wild-type form of a low complexity domain from a neurodegenerative disease target protein. Thus, in some embodiments, the low complexity domain from a neurodegenerative disease target protein does not include a mutation which differs from the wild-type sequence and which is known or suspected to cause or be associated with inducing a neurodegenerative disease pathology in a cell. For example and without limitation, the methods can induce aggregation of a chimeric polypeptide comprising wild-type TDP-43 protein, or fragment thereof, which does not contain a mutation such as Q331K, known to cause or be associated with ALS.

### EXAMPLES

[0117] The following examples are set forth below to illustrate the compounds, compositions, methods, and results according to the disclosed subject matter. These examples are not intended to be inclusive of all aspects of the subject matter disclosed herein, but rather to illustrate representative methods and results. These examples are not intended to exclude equivalents and variations of the present invention which are apparent to one skilled in the art.

### Example 1. Optogenetic Induction of Neurodegenerative Disease Pathologies

[0118] The world is aging. By the year 2050, the proportion of individuals over the age of 60 will have doubled to 2 billion from 605 million in 2000. Unfortunately, aging is the single greatest risk factor for developing a fatal neurodegenerative disease. In turn, the number of individuals with dementias such as Alzheimer's disease (AD), Lewy Body Dementia (LBD), Frontotemporal Dementia (FTD), and movement disorders such as Parkinson's Disease (PD) and Amyotrophic Lateral Sclerosis (ALS) will significantly increase. Nearly 6.5 million individuals within the United States are currently living with one of these diseases and the associated costs are unsustainable. In the United States, the current economic burden of AD, PD, and ALS is an estimated $241 billion dollars per year. AD and ALS/FTD patients can incur personal medical costs upwards of $100,000-$250,000 per year. For AD, it is estimated that 13.8 million individuals in the United States will have been diagnosed by 2050, up from 4.7 million in 2010, while the worldwide number of ALS cases will rise ˜31% by 2040. Moreover, no effective treatment currently exists for these disorders.

[0119] Two decades of genetic analysis has uncovered a number of neurodegenerative disease-associated mutations. However, these are found in only a fraction of AD, LBD, FTD, PD, and ALS patients (Table 1).

TABLE 1
List of common neurodegenerative diseases, pathology and contribution of genetic components.

| | | Affected | Life Expectancy | Primary Aggregate | Genetic |
|---|---|---|---|---|---|
| Disease | Symptoms | CNS Regions | (years) | Pathology | Cause |
| AD | Memory loss, confusion | Entorhinal cortex, | 8-10 | Tau (100%), Aβ (100%) | 2-3% |
| | | Hippocampus | | | |
| FTD | Personality change, | Frontal lobe, | 7-10 | TDP-43 (45%), | 20-25% |
| | compulsivity, aphasia | Temporal lobe | | Tau (45%), Fus (5%) | |
| PD | Stiffness, muscle | Substantia | 15-20+ | α-synuclein (99%) | 10% |
| | rigidity, slowing of | nigra | | | |
| | movement | | | | |
| ALS | Muscle weakness, | Motor cortex, | 3-5 | TDP-43 (97%), | 10% |
| | paralysis | Spinal cord | | SOD1(2%), Fus (1%), | |

[0120] Table 1 describes a selection of neurodegenerative diseases, the primary symptoms, the affected region of the central nervous system (CNS), the aggregate neuropathology observed in patient CNS, percent of patients exhibiting this pathology and the percent of patients that harbor some genetic component of the disease (known or unknown mutation within the family). Alzheimer's disease (AD) is characterized by memory loss and confusion due to degeneration of the hippocampus and entorhinal cortex. Only 1-3% of patients harbor a causal genetic mutation; however all patients show a common aggregate pathology in the affected tissue. This is characterized by the extracellular Amyloid Beta (Aβ) aggregates and intracellular and cytoplasmic aggregations of the Tau protein. Frontotemporal Dementia (FTD) is characterized by the progressive degeneration of the frontal and temporal lobes and while 20-25% of patients can harbor a genetic cause of the disease, the 80-75% of patients have no family history. However, all patients exhibit some form of cytoplasmic protein aggregation that are comprised of either TDP-43 (45% of cases), Tau (45% of cases), or FUS (5% of cases) proteins. Parkinson's Disease (PD), is characterized by the progressive degeneration of dopaminergic neurons in the substantia nigra and while only 10% of patients have a known genetic cause, nearly all patients (99%) show cytoplasmic aggregation of the α-synuclein protein. Amyotrophic Lateral Sclerosis (ALS) is characterized by the rapid degeneration of the motor neurons in the motor cortex in the spinal cord leading patient paralysis and death. Only 10% of ALS patients have a family history of the disease while nearly 90% of cases occur sporadically. To date, nearly 35 causative genetic mutations have been identified in various genes (see FIG. 1), however despite this genetic diversity, nearly all ALS patients exhibit the same neuropathology. Nearly 97% of ALS patients show the cytoplasmic mislocalization of the predominantly nuclear TDP-43 protein in the affected regions. Patients with mutations in the SOD1 or FUS gene also show cytoplasmic aggregations of these proteins but this occurs in only 2% and 1% of all ALS cases, respectively.

[0121] Together, this table highlights that the principal unifying factor of many neurodegenerative diseases are the neuropathological hallmarks. These neuropathologies primarily occur in the form of intracellular protein aggregates and in the vast majority of cases these intracellular protein aggregations form regardless of any known genetic cause. Moreover, these neuropathologies predominantly form in the region and cell types most affected in each disease.

[0122] Interestingly, despite the lack of a common known genetic or environmental cause, these are universal neuropathological features among patients for each disease. Thus, the vast majority of patients (90-100% of all patients depending on the disease) exhibit the same pathology in the central nervous system despite no known genetic cause. These pathological hallmarks manifest in the form of insoluble protein clumps or aggregates in the central nervous system (Table 1, FIG. 1).

[0123] To date, it is not possible to accurately model neurodegenerative disease aggregation that mimics human neuropathology. For each neurodegenerative disease, there is a primary component of the intracellular protein aggregate which harbor protein domains which make these proteins aggregation prone when in a high local concentration (also known as: prion-like domain, low complexity domain, intrinsically disordered domain, intrinsically disordered region). Therefore, current methods to model these neurodegenerative disease aggregates rely on overexpressing these aggregate-prone proteins in vitro or in vivo that comprise the neurodegenerative disease aggregates as the high cellular concentration can, in some models, form aggregates. In addition to, or alternatively, another method of modeling these diseases is to express mutated forms of proteins that comprise neurodegenerative disease aggregates. These mutations are found in a very small subset of patients and typically enhance the ability of the protein to aggregate. Unfortunately, none of these methods recapitulate the cellular environment of patients because the vast majority of patients do not harbor any disease-causing mutation, nor do they grossly overexpress the components of the aggregates. In fact, despite gross overexpression of these proteins, many models still do not exhibit the human neuropathology. This disconnect between the patient biology and model systems has significantly contributed to the lack of translatability of current neurodegenerative disease models.

[0124] Described in this example are novel methods to spatially and temporally induce protein aggregates without simple overexpressing of aggregate prone genes or expressing mutant forms of these genes. Thus, this method better recapitulates the human disease condition. Here, an innovative approach has been undertaken to address this challenging biological problem by harnessing the power of optogenetics (controlling protein function with light). A series of novel DNA arrangements have been constructed that can induce neurodegenerative disease pathology as observed in patients only when the cells are exposed to specific light stimuli. This method is used to create in vitro and in vivo model systems to mimic the neuropathology observed in patients and induce this pathology only after the cells are exposed to specific light wavelengths. This novel approach can transform neurodegenerative disease modeling and, unlike the expression of mutant transgenes, can be used to generate various disease models that are applicable to the vast majority of patients and are temporally and spatially inducible.

[0125] A series of DNA arrangements have been developed comprising the PHR domain (CRY2OLIG or CRY2 PHR) or light-oxygen-voltage-sensing (LOV) domain (NcVVD, NcVVDY50W, Vfau1, YtvA, EL222, RsLOV, AsLOV2) which cluster or homodimerize, respectively, in response to blue light exposure (Table 2) and the DNA sequence of genes that encode for proteins that contain low complexity domains (LCDs) and comprise neurodegenerative disease protein aggregates (Table 3).

TABLE 2
List of photoreceptors/light-induced oligomerization domains to optogenetically
induce neurodegenerative pathologies in cells with blue light exposure.

| | Protein | | Light | Light | |
|---|---|---|---|---|---|
| Nomenclature | Domain | Organism | Stimuli (nm) | Response | Features |
| CRYPHR | Photolyase homology | Arabidopsis | 405-499 | Homo- | Endogenous |
| | region (PHR) | | | oligomerization | protein domain |
| CRY2OLIG | Photolyase | Arabidopsis | 405-499 | Homo- | E490G Mutation |
| | homology region | | | oligomerization | to enhance |
| | (PHR) with E490A | | | | clustering |
| | mutation | | | | |
| NcVVD | Light-oxygen- | Neurospora | 405-499 | Homo- | LOV domain of |
| | voltage-sensing | | | dimerization | VVD gene |
| | (LOV) domain | | | | |
| NcVVDY50W | Light-oxygen- | Neurospora | 405-499 | Homo- | VVD Y50G |
| | voltage-sensing | | | dimerization | Mutation to |
| | (LOV) domain | | | | enhance |
| | | | | | clustering |
| NcLOV | Light-oxygen- | Neurospora | 405-499 | Homo- | Clustering LOV |
| | voltage-sensing | | | dimerization | domain from |
| | (LOV) domain | | | | NcVVD with no |
| | | | | | linker |
| Vfau1 | Light-oxygen- | Vucheria | 405-499 | Homo- | |
| | voltage-sensing | frigida | | dimerization | |
| | (LOV) domain | | | | |
| YtvA | Light-oxygen- | Bacillus | 405-499 | Homo- | |
| | voltage-sensing | subtillis | | dimerization | |
| | (LOV) domain | | | | |
| EL222 | Light-oxygen- | Erythrobacter | 405-499 | Homo- | |
| | voltage-sensing | litoralis | | dimerization | |
| | (LOV) domain | | | | |
| RsLOV | Light-oxygen- | Rhodobacter | 405-499 | Homo- | |
| | voltage-sensing | sphaeroides | | dimerization | |
| | (LOV) domain | | | | |
| AsLOV2 | Light-oxygen- | Avena sativa | 405-499 | Intramolecular | |
| | voltage-sensing | | | conformational | |
| | (LOV) domain | | | change | |

[0126] Table 2 shows a list of photoreceptors to be employed to optogenetically induce neurodegenerative pathologies in cells upon blue light exposure. Variations of the PHR domain of the Cryptochrome 2 protein found in the Arabidopsis plant will be one family of photoreceptors employed (named CRY2 PHR and CRY2OLIG in this document). The PHR domain of the CRY2 protein and its variants have the ability to cluster/homo-oligomerize for ˜5 minutes when exposed to a single pulse of blue light (within the 405-499 nm range). The CRY2 PHR is an endogenous protein sequence found in Arabidopsis. While the CRY2OLIG is the endogenous amino acid sequence but has a E490G mutation and has been shown to exhibit a slightly increased efficiency of clustering upon blue light stimulation. The self-binding of CRY2 PHR and CRY2OLIG act through the same mechanism and requires intracellular FAD+. Various arrangements of CRY2OLIG and target proteins that comprise neuropathological protein aggregates have been generated to show modulation of the light-induced clustering properties of CRY2OLIG to induce neurodegenerative disease pathology of both predominantly cytoplasmic and predominantly nuclear proteins. This includes inducing the cytoplasmic mislocalization of nuclear proteins as observed in patient neuropathology. In addition, these protein domains have been used to induce the aggregation of intrinsically disordered domains/prion-like domains/low complexity domains of truncated versions of these neurodegenerative proteins.

[0127] Vivid (VVD) is a protein generated in the Neurospora organism and is a photoreceptor that homodimerizes in response to blue light (within the 405-499 nm range). The Light-Oxygen-Voltage-Sensing (LOV) domain is common throughout many organisms but this domain is very small in this organism. NcLOV is only the LOV domain of the VVD protein but is conserved throughout other species. NcVVD comprises a small fragment of the N-term VVD protein and the VVD LOV domain. NcVVDY50W from the NcVVD protein sequence however is altered by a Y50W change that promotes a slower ability to dissipate from the dimerized state. It was shown here that persistent dimerization of LOV domains induces oligomerization with chronic light and when fused to an LCD containing protein (FIGS. 6, 8). Although LOV domains are not reported to form oligomers, a light stimulation paradigm to induce protein clustering of specific protein arrangements of these photoreceptors and specific target neurodegenerative disease proteins has been developed herein. Additional LOV domains used herein also include VfAU1, YtvA, EL222, RsLOV, and AsLOV2.

TABLE 3
Target neurodegenerative disease proteins.

| Gene | Encoded | Associated | Human | Predominant Cellular |
|---|---|---|---|---|
| Symbol | Protein | Disease | RefSeqGene | Localization |
| TARDBP | TDP-43 | ALS, FTD, AD, CTE | NG_008734.1 | Nuclear |
| SNCA | Alpha Synuclein | PD, LBD, AD, MSA | NG_011851.1 | Cytoplasmic |
| MAPT | Tau | AD, FTD, CTE, PD | NG_007398.1 | Cytoplasmic |
| FUS | FUS | FTD, ALS | NG_012889.2 | Nuclear |
| SOD1 | SOD1 | ALS | NG_008689.1 | Cytoplasmic |
| TIA1 | TIA1 | ALS | NG_029967.1 | Cytoplasmic & |
| | | | | Nuclear |
| ATXN2 | Ataxin 2 | ALS | NG_011572.2 | Cytoplasmic |
| HNRNPA1 | hnRNPA1 | ALS | NG_033830 1 | Nuclear |
| HNRNPA2B1 | hnRNPA2B1 | ALS | NG_029680.1 | Nuclear |
| EWSR1 | EWS RNA Binding | ALS | NG_023240.1 | Nuclear |
| | Protein 1 | | | |
| TAF15 | TATA box binding | ALS | NG_023279.1 | Nuclear |
| | protein factor 15 | | | |

Abbreviations:
ALS, Amyotrophic Lateral Sclerosis;
FTD, Frontotemporal Dementia;
PD, Parkinsons Disease;
AD, Alzheimer's Disease;
CTE, Chronic Traumatic Encephalopathy;
LBD, Lewy Body Dementia

[0128] Table 3 describes a list of target neurodegenerative disease proteins to generate protein arrangements that recapitulate neurodegenerative disease pathology. Novel arrangements of the photoreceptors in Table 2 fused to neurodegenerative disease proteins such as those listed in Table 3 that respond to these various blue light exposure paradigms to recapitulate neurodegenerative disease pathologies are disclosed herein. This technology is also used to aggregate the prion-like domains/LCD/IDDs of truncated versions of these components that comprise neuropathological aggregates in patients. In this example, studies have been performed with CRY2OLIG and LOV fused to TDP-43, α-synuclein, and Tau proteins. In another example, the target neurodegenerative disease protein can be Huntingtin gene/protein (Accession Ref. NM 002111; NP 002102.4). However, a method was developed that can be applied to any photoreceptor with dimerizing or oligomerization capabilities due to the light treatment paradigms created. The primary purpose of this method is to control the local concentration of neurodegenerative disease proteins for specific periods of time forcing intramolecular crowding of proteins that contain LCDs and aggregate in neurodegenerative diseases. Each neurodegenerative disease protein and photoreceptor arrangement can require specific light stimulation parameters due to the nature of the protein. For example, cytoplasmic proteins or truncated versions of nuclear proteins to localize them to the cytoplasm typically (but not always) require short stimulation paradigms while predominantly nuclear proteins chronic stimulation since the protein will need to be trapped in the cytoplasm during translation (e.g. TDP-43, FUS). Details of the stimulation paradigms are discussed below.

[0129] Light exposure then forces these unique fusion protein arrangements into close proximity and employing chronic or repeated light stimulation, neurodegenerative disease aggregate pathologies of full length proteins or the LCDs alone can be obtained. This temporal and spatial control of neurodegenerative disease aggregates is novel since it does not require overexpression or mutation that are only relevant to a small subset of patients for each disease (Table 1). These proteins are forced to interact and form the disease pathology as occurs in human patients rather than filling the cell with these aggregate prone proteins.

[0130] Beyond protein aggregation, this system creates light-induced pathologies that mimic key pathological features found in patients making it unique compared to overexpression systems. The TDP-43 protein, which contains an LCD, was combined with the CRY2OLIG photoreceptor domain which clusters when exposed to blue light and becomes insoluble and aggregated with persistent light treatment. Fusion proteins of the full length and partial LCD sequence were generated to recapitulate human neurodegenerative disease pathology, including the cytoplasmic mislocalization of nuclear proteins that occurs in patients with ALS and FTD. This system could induce neurodegenerative disease protein aggregates in live HEK cells by exposing them to various blue light stimuli paradigms (FIGS. 4-5). In addition, biochemical hallmarks of ALS, FTD, and AD (FIG. 7) were produced showing that the cell is responding to the light-induced aggregates as observed in patient CNS despite the addition of these tags. Notably, TDP-43 neuropathology is one of the more complex neuropathologies to mimic since it is a predominantly nuclear protein but is found to be mislocalized to the cytoplasm in patients. Employing this DNA arrangement and light stimulation system as an example, cytoplasmic TDP-43 aggregates were obtained that are also ubiquitinylated, cleaved, and hyperphosphorylated as observed in ALS, FTD, and AD patients. TDP-43 pathology is also found in AD as well as Chronic Traumatic Encephalopathy (CTE) thus highlighting the potential disease relevance of this work. In addition, a protein arrangement and light stimulation paradigm was developed to induce the aggregation of α-synuclein (FIG. 6), which is found in the CNS of patients diagnosed with Parkinson's Disease and Lewy Body Dementia. Methods were also developed to induce intracellular aggregation of Tau protein using both the Cry-PHR and LOV photoreceptors (FIG. 7) and persistent blue light stimulation. These tau tangles are pathological hallmarks of AD, FTD and CTE in HEK cells. These also exhibit pathological hallmarks of Tauopathy observed in patients including hyperphosphorylation using specific antibodies developed against pathological tau inclusions (FIGS. 7-8). Finally, it was shown that this method can be utilized to seed aggregations, as aggregates of TDP-43 formed using this method recruit endogenous TDP-43 to seed the pathogenic neuropathology (FIGS. 5F, 5G).

[0131] A novel methodology to force oligomerization and aggregation of LOV domain proteins fused to proteins that contain LCDs was also developed. The LOV domains, including NcVVDY50W has only been shown to dimerize with blue light stimulation. Using a chronic blue light stimulation paradigm (described in FIGS. 3 and 6-8), oligomerization and eventual aggregation of a LCD containing protein fused to the LOV sequence is induced. This amino acid sequence is significantly smaller than the PHR domain of CRY2 and may act as an alternative to CRY2 PHR since it is less likely to interfere with the endogenous target protein function.

[0132] In some embodiments, DNA arrangements are constructed that encode for the PHR domains (CRY2 PHR or CRY2OLIG) or LOV photoreceptor proteins (NcVVD, NcVVDY50W, Vfau1, YtvA, EL222, RsLOV, AsLOV2) (or 90% similarity) fused to either the LCD fragment or full length neurodegenerative disease proteins listed in Table 3 (or 90% similarity). In some embodiments, disclosed herein are methods of employing blue light exposure treatment paradigms to induce these neurodegenerative disease pathologies. In other embodiments, the resulting protein aggregates and cell viability are used as a readout for neurodegenerative disease drug screening (FIG. 10). This system is used by pharmacologically or genetically mitigating neurodegenerative disease pathology formation or resident time can identify novel compounds for the treatment of specific neurodegenerative diseases. The following embodiments are also disclosed:

[0133] 1. Generation of Novel Model Systems: These photoreceptor sequences are inserted into the genome of various in vitro and in vivo systems which can act as a new model to study neurodegenerative diseases. Some examples of in vitro uses include human and rodent cell lines, induced pluripotent stem cells (iPSCs), or yeast. Some examples of in vivo uses include invertebrates: Drosophila melanogaster (fruit fly), Caenorhabditis elegans (round worm), or Danio rerio (zebrafish). Other examples of in vivo uses include vertebrates: mouse, rat, or non-human primate.

[0134] 2. These compounds, methods, and systems (such as iPSC) with edited genomes are used in high throughput drug screening systems. To achieve this, neurodegenerative disease pathologies are induced by stimulating cells with light. Cell viability and formation and residence time of protein aggregate/pathology in the presence of compound libraries are then examined. In addition, assays also involve employing survival and neuropathology of in vivo models following induction with light.

SEQUENCES
Amino Acid Sequences of Photoreceptor Tools:
Amino Acid Sequences of the Photolyase-Homologous Region (PHR) domain of the
Arabidopsis Cryptochrome 2 protein:
SEQ ID NO: 1. Cryptochrome 2 PHR Domain; Cry2PHR:
MKMDKKTIVWFRRDLRIEDNPALAAAAHEGSVFPVFIWCPEEEGQFYPGRASRWWMKQSLAHLSQSLKALGSDLTLI
KTHNTISAILDCIRVTGATKVVFNHLYDPVSLVRDHTVKEKLVERGISVQSYNGDLLYEPWEIYCEKGKPFTSFNSYWKKC
LDMSIESVMLPPPWRLMPITAAAEAIWACSIEELGLENEAEKPSNALLTRAWSPGWSNADKLLNEFIEKQLIDYAKNSK
KVVGNSTSLLSPYLHFGEISVRHVFQCARMKQIIWARDKNSEGEESADLFLRGIGLREYSRYICFNFPFTHEQSLLSHLRFF
PWDADVDKFKAWRQGRTGYPLVDAGMRELWATGWMHNRIRVIVSSFAVKFLLLPWKWGMKYFWDTLLDADLEC
DILGWQYISGSIPDGHELDRLDNPALQGAKYDPEGEYIRQWLPELARLPTEWIHHPWDAPLTVLKASGVELGTNYAKPI
VDIDTARELLAKAISRTREAQIMIGAA
SEQ ID NO: 2. Cryptochrome 2 PHR Domain with E490G substitution; Cry2Olig:
(E490G in bold)
MKMDKKTIVWFRRDLRIEDNPALAAAAHEGSVFPVFIWCPEEEGQFYPGRASRWWMKQSLAHLSQSLKALGSDLTLI
KTHNTISAILDCIRVTGATKVVFNHLYDPVSLVRDHTVKEKLVERGISVQSYNGDLLYEPWEIYCEKGKPFTSFNSYWKKC
LDMSIESVMLPPPWRLMPITAAAEAIWACSIEELGLENEAEKPSNALLTRAWSPGWSNADKLLNEFIEKQLIDYAKNSK
KVVGNSTSLLSPYLHFGEISVRHVFQCARMKQIIWARDKNSEGEESADLFLRGIGLREYSRYICFNFPFTHEQSLLSHLRFF
PWDADVDKFKAWRQGRTGYPLVDAGMRELWATGWMHNRIRVIVSSFAVKFLLLPWKWGMKYFWDTLLDADLEC
DILGWQYISGSIPDGHELDRLDNPALQGAKYDPEGEYIRQWLPELARLPTEWIHHPWDAPLTVLKASGVELGTNYAKPI
VDIDTARELLAKAISRTRGAQIMIGAA
Amino Acid Sequences containing the Light-Oxygen-Voltage-Sensing Domain (LOV) from
Neurospora Vivid protein:
SEQ ID NO: 3. VVD LOV Domain only:
MTSCALILCDLKQKDTPIVYASEAFLYMTGYSNAEVLGRNCRFLQSPDGMVKPKSTRKYVDSNTINTMRKAIDRNAEVQ
VEVVNFKKNGQRFVNFLTMIPVRDETGEYRYSMGFQCETE
SEQ ID NO: 4. NcVivid (NcVVD):
HTLYAPGGYDIMGYLIQIMNRPNPQVELGPVDTSCALILCDLKQKDTPIVYASEAFLYMTGYSNAEVLGRNCRFLQSPD
GMVKPKSTRKYVDSNTINTMRKAIDRNAEVQVEVVNFKKNGQRFVNFLTMIPVRDETGEYRYSMGFQCETE
SEQ ID NO: 5. NcVivid Y50W substitution; NcVVDY50W: (Y50W in bold)
HTLYAPGGYDIMGWLIQIMNRPNPQVELGPVDTSCALILCDLKQKDTPIVYASEAFLYMTGYSNAEVLGRNCRFLQSPD
GMVKPKSTRKYVDSNTINTMRKAIDRNAEVQVEVVNFKKNGQRFVNFLTMIPVRDETGEYRYSMGFQCETE
TDP-43 Protein Arrangements Generated:
1. Cry2olig Fusion Proteins Amino Acid Sequences:
A) Full Length TDP-43 Protein No Reporter
SEQ ID NO: 6. Cry2olig-TDP-43:
MKMDKKTIVWFRRDLRIEDNPALAAAAHEGSVFPVFIWCPEEEGQFYPGRASRWWMKQSLAHLSQSLKALGSDLTLI
KTHNTISAILDCIRVTGATKVVFNHLYDPVSLVRDHTVKEKLVERGISVQSYNGDLLYEPWEIYCEKGKPFTSFNSYWKKC
LDMSIESVMLPPPWRLMPITAAAEAIWACSIEELGLENEAEKPSNALLTRAWSPGWSNADKLLNEFIEKQLIDYAKNSK
KVVGNSTSLLSPYLHFGEISVRHVFQCARMKQIIWARDKNSEGEESADLFLRGIGLREYSRYICFNFPFTHEQSLLSHLRFF
PWDADVDKFKAWRQGRTGYPLVDAGMRELWATGWMHNRIRVIVSSFAVKFLLLPWKWGMKYFWDTLLDADLEC
DILGWQYISGSIPDGHELDRLDNPALQGAKYDPEGEYIRQWLPELARLPTEWIHHPWDAPLTVLKASGVELGTNYAKPI
VDIDTARELLAKAISRTRGAQIMIGAAARGMSEYIRVTEDENDEPIEIPSEDDGTVLLSTVTAQFPGACGLRYRNPVSQC
MRGVRLVEGILHAPDAGWGNLVYVVNYPKDNKRKMDETDASSAVKVKRAVQKTSDLIVLGLPWKTTEQDLKEYFSTF
GEVLMVQVKKDLKTGHSKGFGFVRFTEYETQVKVMSQRHMIDGRWCDCKLPNSKQSQDEPLRSRKVFVGRCTEDMT
EDELREFFSQYGDVMDVFIPKPFRAFAFVTFADDQIAQSLCGEDLIIKGISVHISNAEPKHNSNRQLERSGRFGGNPGGF
GNQGGFGNSRGGGAGLGNNQGSNMGGGMNFGAFSINPAMMAAAQAALQSSWGMMGMLASQQNQSGPSGN
NQNQGNMQREPNQAFGSGNNSYSGSNSGAAIGWGSASNAGSGSGFNGGFGSSMDSKSSGWGM
SEQ ID NO: 7. TDP-43-Cry2olig:
MSEYIRVTEDENDEPIEIPSEDDGTVLLSTVTAQFPGACGLRYRNPVSQCMRGVRLVEGILHAPDAGWGNLVYVVNYP
KDNKRKMDETDASSAVKVKRAVQKTSDLIVLGLPWKTTEQDLKEYFSTFGEVLMVQVKKDLKTGHSKGFGFVRFTEYE
TQVKVMSQRHMIDGRWCDCKLPNSKQSQDEPLRSRKVFVGRCTEDMTEDELREFFSQYGDVMDVFIPKPFRAFAFVT
FADDQIAQSLCGEDLIIKGISVHISNAEPKHNSNRQLERSGRFGGNPGGFGNQGGFGNSRGGGAGLGNNQGSNMGG
GMNFGAFSINPAMMAAAQAALQSSWGMMGMLASQQNQSGPSGNNQNQGNMQREPNQAFGSGNNSYSGSNS
GAAIGWGSASNAGSGSGFNGGFGSSMDSKSSGWGM LEAT
MKMDKKTIVWFRRDLRIEDNPALAAAAHEGSVFPVFIWCPEEEGQFYPGRASRWWMKQSLAHLSQSLKALGSDLTLI
KTHNTISAILDCIRVTGATKVVFNHLYDPVSLVRDHTVKEKLVERGISVQSYNGDLLYEPWEIYCEKGKPFTSFNSYWKKC
LDMSIESVMLPPPWRLMPITAAAEAIWACSIEELGLENEAEKPSNALLTRAWSPGWSNADKLLNEFIEKQLIDYAKNSK
KVVGNSTSLLSPYLHFGEISVRHVFQCARMKQIIWARDKNSEGEESADLFLRGIGLREYSRYICFNFPFTHEQSLLSHLRFF
PWDADVDKFKAWRQGRTGYPLVDAGMRELWATGWMHNRIRVIVSSFAVKFLLLPWKWGMKYFWDTLLDADLEC
DILGWQYISGSIPDGHELDRLDNPALQGAKYDPEGEYIRQWLPELARLPTEWIHHPWDAPLTVLKASGVELGTNYAKPI
VDIDTARELLAKAISRTRGAQIMIGAA
B) Truncated TDP-43 Proteins No Reporter
SEQ ID NO: 8. TDP-43^{(AA274-414)}-Cry2olig:
MGRFGGNPGGFGNQGGFGNSRGGGAGLGNNQGSNMGGGMNFGAFSINPAMMAAAQAALQSSWGMMGMLA
SQQNQSGPSGNNQNQGNMQREPNQAFGSGNNSYSGSNSGAAIGWGSASNAGSGSGFNGGFGSSMDSKSSGWG
MLEATMKMDKKTIVWFRRDLRIEDNPALAAAAHEGSVFPVFIWCPEEEGQFYPGRASRWWMKQSLAHLSQSLKALG
SDLTLIKTHNTISAILDCIRVTGATKVVFNHLYDPVSLVRDHTVKEKLVERGISVQSYNGDLLYEPWEIYCEKGKPFTSFNSY
WKKCLDMSIESVMLPPPWRLMPITAAAEAIWACSIEELGLENEAEKPSNALLTRAWSPGWSNADKLLNEFIEKQLIDYA
KNSKKVVGNSTSLLSPYLHFGEISVRHVFQCARMKQIIWARDKNSEGEESADLFLRGIGLREYSRYICFNFPFTHEQSLLSH
LRFFPWDADVDKFKAWRQGRTGYPLVDAGMRELWATGWMHNRIRVIVSSFAVKFLLLPWKWGMKYFWDTLLDAD
LECDILGWQYISGSIPDGHELDRLDNPALQGAKYDPEGEYIRQWLPELARLPTEWIHHPWDAPLTVLKASGVELGTNYA
KPIVDIDTARELLAKAISRTRGAQIMIGAA
SEQ ID NO: 9. TDP-43^{(AA191-414)}-Cry2olig:
MRKVFVGRCTEDMTEDELREFFSQYGDVMDVFIPKPFRAFAFVTFADDQIAQSLCGEDLIIKGISVHISNAEPKHNSNR
QLERSGRFGGNPGGFGNQGGFGNSRGGGAGLGNNQGSNMGGGMNFGAFSINPAMMAAAQAALQSSWGMMG
MLASQQNQSGPSGNNQNQGNMQREPNQAFGSGNNSYSGSNSGAAIGWGSASNAGSGSGFNGGFGSSMDSKSSG
WGMLEATMKMDKKTIVWFRRDLRIEDNPALAAAAHEGSVFPVFIWCPEEEGQFYPGRASRWWMKQSLAHLSQSLK
ALGSDLTLIKTHNTISAILDCIRVTGATKVVFNHLYDPVSLVRDHTVKEKLVERGISVQSYNGDLLYEPWEIYCEKGKPFTSF
NSYWKKCLDMSIESVMLPPPWRLMPITAAAEAIWACSIEELGLENEAEKPSNALLTRAWSPGWSNADKLLNEFIEKQLI
DYAKNSKKVVGNSTSLLSPYLHFGEISVRHVFQCARMKQIIWARDKNSEGEESADLFLRGIGLREYSRYICFNFPFTHEQS
LLSHLRFFPWDADVDKFKAWRQGRTGYPLVDAGMRELWATGWMHNRIRVIVSSFAVKFLLLPWKWGMKYFWDTLL
DADLECDILGWQYISGSIPDGHELDRLDNPALQGAKYDPEGEYIRQWLPELARLPTEWIHHPWDAPLTVLKASGVELGT
NYAKPIVDIDTARELLAKAISRTRGAQIMIGAA
SEQ ID NO: 10. TDP-43^{(AA105-414)}-Cry2olig:
MDLIVLGLPWKTTEQDLKEYFSTFGEVLMVQVKKDLKTGHSKGFGFVRFTEYETQVKVMSQRHMIDGRWCDCKLPNS
KQSQDEPLRSRKVFVGRCTEDMTEDELREFFSQYGDVMDVFIPKPFRAFAFVTFADDQIAQSLCGEDLIIKGISVHISNAE
PKHNSNRQLERSGRFGGNPGGFGNQGGFGNSRGGGAGLGNNQGSNMGGGMNFGAFSINPAMMAAAQAALQSS
WGMMGMLASQQNQSGPSGNNQNQGNMQREPNQAFGSGNNSYSGSNSGAAIGWGSASNAGSGSGFNGGFGSS
MDSKSSGWGM
LEATMKMDKKTIVWFRRDLRIEDNPALAAAAHEGSVFPVFIWCPEEEGQFYPGRASRWWMKQSLAHLSQSLKALGSD
LTLIKTHNTISAILDCIRVTGATKVVFNHLYDPVSLVRDHTVKEKLVERGISVQSYNGDLLYEPWEIYCEKGKPFTSFNSYW
KKCLDMSIESVMLPPPWRLMPITAAAEAIWACSIEELGLENEAEKPSNALLTRAWSPGWSNADKLLNEFIEKQLIDYAK
NSKKVVGNSTSLLSPYLHFGEISVRHVFQCARMKQIIWARDKNSEGEESADLFLRGIGLREYSRYICFNFPFTHEQSLLSHL
RFFPWDADVDKFKAWRQGRTGYPLVDAGMRELWATGWMHNRIRVIVSSFAVKFLLLPWKWGMKYFWDTLLDADL
ECDILGWQYISGSIPDGHELDRLDNPALQGAKYDPEGEYIRQWLPELARLPTEWIHHPWDAPLTVLKASGVELGTNYAK
PIVDIDTARELLAKAISRTRGAQIMIGAA
SEQ ID NO: 11. Cry2olig-TDP-43^{(AA274-414)}:
MKMDKKTIVWFRRDLRIEDNPALAAAAHEGSVFPVFIWCPEEEGQFYPGRASRWWMKQSLAHLSQSLKALGSDLTLI
KTHNTISAILDCIRVTGATKVVFNHLYDPVSLVRDHTVKEKLVERGISVQSYNGDLLYEPWEIYCEKGKPFTSFNSYWKKC
LDMSIESVMLPPPWRLMPITAAAEAIWACSIEELGLENEAEKPSNALLTRAWSPGWSNADKLLNEFIEKQLIDYAKNSK
KVVGNSTSLLSPYLHFGEISVRHVFQCARMKQIIWARDKNSEGEESADLFLRGIGLREYSRYICFNFPFTHEQSLLSHLRFF
PWDADVDKFKAWRQGRTGYPLVDAGMRELWATGWMHNRIRVIVSSFAVKFLLLPWKWGMKYFWDTLLDADLEC
DILGWQYISGSIPDGHELDRLDNPALQGAKYDPEGEYIRQWLPELARLPTEWIHHPWDAPLTVLKASGVELGTNYAKPI
VDIDTARELLAKAISRTRGAQIMIGAAARGGRFGGNPGGFGNQGGFGNSRGGGAGLGNNQGSNMGGGMNFGAFSI
NPAMMAAAQAALQSSWGMMGMLASQQNQSGPSGNNQNQGNMQREPNQAFGSGNNSYSGSNSGAAIGWGSA
SNAGSGSGFNGGFGSSMDSKSSGWGM
SEQ ID NO: 12. Cry2olig-TDP-43^{(AA191-414)}:
MKMDKKTIVWFRRDLRIEDNPALAAAAHEGSVFPVFIWCPEEEGQFYPGRASRWWMKQSLAHLSQSLKALGSDLTLI
KTHNTISAILDCIRVTGATKVVFNHLYDPVSLVRDHTVKEKLVERGISVQSYNGDLLYEPWEIYCEKGKPFTSFNSYWKKC
LDMSIESVMLPPPWRLMPITAAAEAIWACSIEELGLENEAEKPSNALLTRAWSPGWSNADKLLNEFIEKQLIDYAKNSK
KVVGNSTSLLSPYLHFGEISVRHVFQCARMKQIIWARDKNSEGEESADLFLRGIGLREYSRYICFNFPFTHEQSLLSHLRFF
PWDADVDKFKAWRQGRTGYPLVDAGMRELWATGWMHNRIRVIVSSFAVKFLLLPWKWGMKYFWDTLLDADLEC
DILGWQYISGSIPDGHELDRLDNPALQGAKYDPEGEYIRQWLPELARLPTEWIHHPWDAPLTVLKASGVELGTNYAKPI
VDIDTARELLAKAISRTRGAQIMIGAAARGRKVFVGRCTEDMTEDELREFFSQYGDVMDVFIPKPFRAFAFVTFADDQI
AQSLCGEDLIIKGISVHISNAEPKHNSNRQLERSGRFGGNPGGFGNQGGFGNSRGGGAGLGNNQGSNMGGGMNFG
AFSINPAMMAAAQAALQSSWGMMGMLASQQNQSGPSGNNQNQGNMQREPNQAFGSGNNSYSGSNSGAAIGW
GSASNAGSGSGFNGGFGSSMDSKSSGWGM
SEQ ID NO: 13. Cry2olig-TDP-43^{(AA105-414)}:
MKMDKKTIVWFRRDLRIEDNPALAAAAHEGSVFPVFIWCPEEEGQFYPGRASRWWMKQSLAHLSQSLKALGSDLTLI
KTHNTISAILDCIRVTGATKVVFNHLYDPVSLVRDHTVKEKLVERGISVQSYNGDLLYEPWEIYCEKGKPFTSFNSYWKKC
LDMSIESVMLPPPWRLMPITAAAEAIWACSIEELGLENEAEKPSNALLTRAWSPGWSNADKLLNEFIEKQLIDYAKNSK
KVVGNSTSLLSPYLHFGEISVRHVFQCARMKQIIWARDKNSEGEESADLFLRGIGLREYSRYICFNFPFTHEQSLLSHLRFF
PWDADVDKFKAWRQGRTGYPLVDAGMRELWATGWMHNRIRVIVSSFAVKFLLLPWKWGMKYFWDTLLDADLEC
DILGWQYISGSIPDGHELDRLDNPALQGAKYDPEGEYIRQWLPELARLPTEWIHHPWDAPLTVLKASGVELGTNYAKPI
VDIDTARELLAKAISRTRGAQIMIGAAARGDLIVLGLPWKTTEQDLKEYFSTFGEVLMVQVKKDLKTGHSKGFGFVRFTE
YETQVKVMSQRHMIDGRWCDCKLPNSKQSQDEPLRSRKVFVGRCTEDMTEDELREFFSQYGDVMDVFIPKPFRAFAF
VTFADDQIAQSLCGEDLIIKGISVHISNAEPKHNSNRQLERSGRFGGNPGGFGNQGGFGNSRGGGAGLGNNQGSNM
GGGMNFGAFSINPAMMAAAQAALQSSWGMMGMLASQQNQSGPSGNNQNQGNMQREPNQAFGSGNNSYSGS
NSGAAIGWGSASNAGSGSGFNGGFGSSMDSKSSGWGM
C) Full Length TDP-43 Protein + mCherry Reporter
SEQ ID NO: 14. Cry2olig-TDP-43-mCherry
MKMDKKTIVWFRRDLRIEDNPALAAAAHEGSVFPVFIWCPEEEGQFYPGRASRWWMKQSLAHLSQSLKALGSDLTLI
KTHNTISAILDCIRVTGATKVVFNHLYDPVSLVRDHTVKEKLVERGISVQSYNGDLLYEPWEIYCEKGKPFTSFNSYWKKC
LDMSIESVMLPPPWRLMPITAAAEAIWACSIEELGLENEAEKPSNALLTRAWSPGWSNADKLLNEFIEKQLIDYAKNSK
KVVGNSTSLLSPYLHFGEISVRHVFQCARMKQIIWARDKNSEGEESADLFLRGIGLREYSRYICFNFPFTHEQSLLSHLRFF
PWDADVDKFKAWRQGRTGYPLVDAGMRELWATGWMHNRIRVIVSSFAVKFLLLPWKWGMKYFWDTLLDADLEC
DILGWQYISGSIPDGHELDRLDNPALQGAKYDPEGEYIRQWLPELARLPTEWIHHPWDAPLTVLKASGVELGTNYAKPI
VDIDTARELLAKAISRTRGAQIMIGAAARG
MSEYIRVTEDENDEPIEIPSEDDGTVLLSTVTAQFPGACGLRYRNPVSQCMRGVRLVEGILHAPDAGWGNLVYVVNYP
KDNKRKMDETDASSAVKVKRAVQKTSDLIVLGLPWKTTEQDLKEYFSTFGEVLMVQVKKDLKTGHSKGFGFVRFTEYE
TQVKVMSQRHMIDGRWCDCKLPNSKQSQDEPLRSRKVFVGRCTEDMTEDELREFFSQYGDVMDVFIPKPFRAFAFVT
FADDQIAQSLCGEDLIIKGISVHISNAEPKHNSNRQLERSGRFGGNPGGFGNQGGFGNSRGGGAGLGNNQGSNMGG
GMNFGAFSINPAMMAAAQAALQSSWGMMGMLASQQNQSGPSGNNQNQGNMQREPNQAFGSGNNSYSGSNS
GAAIGWGSASNAGSGSGFNGGFGSSMDSKSSGWGMSRDPPVATMVSKGEEDNMAIIKEFMRFKVHMEGSVNGHE
FEIEGEGEGRPYEGTQTAKLKVTKGGPLPFAWDILSPQFMYGSKAYVKHPADIPDYLKLSFPEGFKWERVMNFEDGGV
VTVTQDSSLQDGEFIYKVKLRGTNFPSDGPVMQKKTMGWEASSERMYPEDGALKGEIKQRLKLKDGGHYDAEVKTTY
KAKKPVQLPGAYNVNIKLDITSHNEDYTIVEQYERAEGRHSTGGMDELYK
SEQ ID NO: 15. TDP-43-Cry2olig-mCherry:
MSEYIRVTEDENDEPIEIPSEDDGTVLLSTVTAQFPGACGLRYRNPVSQCMRGVRLVEGILHAPDAGWGNLVYVVNYP
KDNKRKMDETDASSAVKVKRAVQKTSDLIVLGLPWKTTEQDLKEYFSTFGEVLMVQVKKDLKTGHSKGFGFVRFTEYE
TQVKVMSQRHMIDGRWCDCKLPNSKQSQDEPLRSRKVFVGRCTEDMTEDELREFFSQYGDVMDVFIPKPFRAFAFVT
FADDQIAQSLCGEDLIIKGISVHISNAEPKHNSNRQLERSGRFGGNPGGFGNQGGFGNSRGGGAGLGNNQGSNMGG
GMNFGAFSINPAMMAAAQAALQSSWGMMGMLASQQNQSGPSGNNQNQGNMQREPNQAFGSGNNSYSGSNS
GAAIGWGSASNAGSGSGFNGGFGSSMDSKSSGWGMLEATMKMDKKTIVWFRRDLRIEDNPALAAAAHEGSVFPVFI
WCPEEEGQFYPGRASRWWMKQSLAHLSQSLKALGSDLTLIKTHNTISAILDCIRVTGATKVVFNHLYDPVSLVRDHTVK
EKLVERGISVQSYNGDLLYEPWEIYCEKGKPFTSFNSYWKKCLDMSIESVMLPPPWRLMPITAAAEAIWACSIEELGLEN
EAEKPSNALLTRAWSPGWSNADKLLNEFIEKQLIDYAKNSKKVVGNSTSLLSPYLHFGEISVRHVFQCARMKQIIWARD
KNSEGEESADLFLRGIGLREYSRYICFNFPFTHEQSLLSHLRFFPWDADVDKFKAWRQGRTGYPLVDAGMRELWATGW
MHNRIRVIVSSFAVKFLLLPWKWGMKYFWDTLLDADLECDILGWQYISGSIPDGHELDRLDNPALQGAKYDPEGEYIR
QWLPELARLPTEWIHHPWDAPLTVLKASGVELGTNYAKPIVDIDTARELLAKAISRTRGAQIMIGAAARDPPVATMVSK
GEEDNMAIIKEFMRFKVHMEGSVNGHEFEIEGEGEGRPYEGTQTAKLKVTKGGPLPFAWDILSPQFMYGSKAYVKHP
ADIPDYLKLSFPEGFKWERVMNFEDGGVVTVTQDSSLQDGEFIYKVKLRGTNFPSDGPVMQKKTMGWEASSERMYP
EDGALKGEIKQRLKLKDGGHYDAEVKTTYKAKKPVQLPGAYNVNIKLDITSHNEDYTIVEQYERAEGRHSTGGMDELYK
SEQ ID NO: 16. mCherry-TDP-43-Cry2olig:
MVSKGEEDNMAIIKEFMRFKVHMEGSVNGHEFEIEGEGEGRPYEGTQTAKLKVTKGGPLPFAWDILSPQFMYGSKAY
VKHPADIPDYLKLSFPEGFKWERVMNFEDGGVVTVTQDSSLQDGEFIYKVKLRGTNFPSDGPVMQKKTMGWEASSER
MYPEDGALKGEIKQRLKLKDGGHYDAEVKTTYKAKKPVQLPGAYNVNIKLDITSHNEDYTIVEQYERAEGRHSTGGMD
ELYKMSEYIRVTEDENDEPIEIPSEDDGTVLLSTVTAQFPGACGLRYRNPVSQCMRGVRLVEGILHAPDAGWGNLVYVV
NYPKDNKRKMDETDASSAVKVKRAVQKTSDLIVLGLPWKTTEQDLKEYFSTFGEVLMVQVKKDLKTGHSKGFGFVRFT
EYETQVKVMSQRHMIDGRWCDCKLPNSKQSQDEPLRSRKVFVGRCTEDMTEDELREFFSQYGDVMDVFIPKPFRAFA
FVTFADDQIAQSLCGEDLIIKGISVHISNAEPKHNSNRQLERSGRFGGNPGGFGNQGGFGNSRGGGAGLGNNQGSNM
GGGMNFGAFSINPAMMAAAQAALQSSWGMMGMLASQQNQSGPSGNNQNQGNMQREPNQAFGSGNNSYSGS
NSGAAIGWGSASNAGSGSGFNGGFGSSMDSKSSGWGMLEATMKMDKKTIVWFRRDLRIEDNPALAAAAHEGSVFP
VFIWCPEEEGQFYPGRASRWWMKQSLAHLSQSLKALGSDLTLIKTHNTISAILDCIRVTGATKVVFNHLYDPVSLVRDHT
VKEKLVERGISVQSYNGDLLYEPWEIYCEKGKPFTSFNSYWKKCLDMSIESVMLPPPWRLMPITAAAEAIWACSIEELGL
ENEAEKPSNALLTRAWSPGWSNADKLLNEFIEKQLIDYAKNSKKVVGNSTSLLSPYLHFGEISVRHVFQCARMKQIIWA
RDKNSEGEESADLFLRGIGLREYSRYICFNFPFTHEQSLLSHLRFFPWDADVDKFKAWRQGRTGYPLVDAGMRELWAT
GWMHNRIRVIVSSFAVKFLLLPWKWGMKYFWDTLLDADLECDILGWQYISGSIPDGHELDRLDNPALQGAKYDPEGE
YIRQWLPELARLPTEWIHHPWDAPLTVLKASGVELGTNYAKPIVDIDTARELLAKAISRTRGAQIMIGAA
D) Truncated TDP-43 Proteins + mCherry Reporter
SEQ ID NO: 17. TDP-43^{(AA274-414)}-Cry2olig-mCherry:
MGRFGGNPGGFGNQGGFGNSRGGGAGLGNNQGSNMGGGMNFGAFSINPAMMAAAQAALQSSWGMMGMLA
SQQNQSGPSGNNQNQGNMQREPNQAFGSGNNSYSGSNSGAAIGWGSASNAGSGSGFNGGFGSSMDSKSSGWG
MLEATMKMDKKTIVWFRRDLRIEDNPALAAAAHEGSVFPVFIWCPEEEGQFYPGRASRWWMKQSLAHLSQSLKALG
SDLTLIKTHNTISAILDCIRVTGATKVVFNHLYDPVSLVRDHTVKEKLVERGISVQSYNGDLLYEPWEIYCEKGKPFTSFNSY
WKKCLDMSIESVMLPPPWRLMPITAAAEAIWACSIEELGLENEAEKPSNALLTRAWSPGWSNADKLLNEFIEKQLIDYA
KNSKKVVGNSTSLLSPYLHFGEISVRHVFQCARMKQIIWARDKNSEGEESADLFLRGIGLREYSRYICFNFPFTHEQSLLSH
LRFFPWDADVDKFKAWRQGRTGYPLVDAGMRELWATGWMHNRIRVIVSSFAVKFLLLPWKWGMKYFWDTLLDAD
LECDILGWQYISGSIPDGHELDRLDNPALQGAKYDPEGEYIRQWLPELARLPTEWIHHPWDAPLTVLKASGVELGTNYA
KPIVDIDTARELLAKAISRTRGAQIMIGAAARDPPVATMVSKGEEDNMAIIKEFMRFKVHMEGSVNGHEFEIEGEGEGR
PYEGTQTAKLKVTKGGPLPFAWDILSPQFMYGSKAYVKHPADIPDYLKLSFPEGFKWERVMNFEDGGVVTVTQDSSLQ
DGEFIYKVKLRGTNFPSDGPVMQKKTMGWEASSERMYPEDGALKGEIKQRLKLKDGGHYDAEVKTTYKAKKPVQLPG
AYNVNIKLDITSHNEDYTIVEQYERAEGRHSTGGMDELYK
SEQ ID NO: 18. TDP-43^{(AA191-414)}-Cry2olig-mCherry:
MRKVFVGRCTEDMTEDELREFFSQYGDVMDVFIPKPFRAFAFVTFADDQIAQSLCGEDLIIKGISVHISNAEPKHNSNR
QLERSGRFGGNPGGFGNQGGFGNSRGGGAGLGNNQGSNMGGGMNFGAFSINPAMMAAAQAALQSSWGMMG
MLASQQNQSGPSGNNQNQGNMQREPNQAFGSGNNSYSGSNSGAAIGWGSASNAGSGSGFNGGFGSSMDSKSSG
WGMLEATMKMDKKTIVWFRRDLRIEDNPALAAAAHEGSVFPVFIWCPEEEGQFYPGRASRWWMKQSLAHLSQSLK
ALGSDLTLIKTHNTISAILDCIRVTGATKVVFNHLYDPVSLVRDHTVKEKLVERGISVQSYNGDLLYEPWEIYCEKGKPFTSF
NSYWKKCLDMSIESVMLPPPWRLMPITAAAEAIWACSIEELGLENEAEKPSNALLTRAWSPGWSNADKLLNEFIEKQLI
DYAKNSKKVVGNSTSLLSPYLHFGEISVRHVFQCARMKQIIWARDKNSEGEESADLFLRGIGLREYSRYICFNFPFTHEQS
LLSHLRFFPWDADVDKFKAWRQGRTGYPLVDAGMRELWATGWMHNRIRVIVSSFAVKFLLLPWKWGMKYFWDTLL
DADLECDILGWQYISGSIPDGHELDRLDNPALQGAKYDPEGEYIRQWLPELARLPTEWIHHPWDAPLTVLKASGVELGT
NYAKPIVDIDTARELLAKAISRTRGAQIMIGAAARDPPVATMVSKGEEDNMAIIKEFMRFKVHMEGSVNGHEFEIEGEG
EGRPYEGTQTAKLKVTKGGPLPFAWDILSPQFMYGSKAYVKHPADIPDYLKLSFPEGFKWERVMNFEDGGVVTVTQDS
SLQDGEFIYKVKLRGTNFPSDGPVMQKKTMGWEASSERMYPEDGALKGEIKQRLKLKDGGHYDAEVKTTYKAKKPVQ
LPGAYNVNIKLDITSHNEDYTIVEQYERAEGRHSTGGMDELYK
SEQ ID NO: 19. TDP-43^{(AA105-414)}-Cry2olig-mCherry:
MDLIVLGLPWKTTEQDLKEYFSTFGEVLMVQVKKDLKTGHSKGFGFVRFTEYETQVKVMSQRHMIDGRWCDCKLPNS
KQSQDEPLRSRKVFVGRCTEDMTEDELREFFSQYGDVMDVFIPKPFRAFAFVTFADDQIAQSLCGEDLIIKGISVHISNAE
PKHNSNRQLERSGRFGGNPGGFGNQGGFGNSRGGGAGLGNNQGSNMGGGMNFGAFSINPAMMAAAQAALQSS
WGMMGMLASQQNQSGPSGNNQNQGNMQREPNQAFGSGNNSYSGSNSGAAIGWGSASNAGSGSGFNGGFGSS
MDSKSSGWGMLEATMKMDKKTIVWFRRDLRIEDNPALAAAAHEGSVFPVFIWCPEEEGQFYPGRASRWWMKQSL
AHLSQSLKALGSDLTLIKTHNTISAILDCIRVTGATKVVFNHLYDPVSLVRDHTVKEKLVERGISVQSYNGDLLYEPWEIYC
EKGKPFTSFNSYWKKCLDMSIESVMLPPPWRLMPITAAAEAIWACSIEELGLENEAEKPSNALLTRAWSPGWSNADKL
LNEFIEKQLIDYAKNSKKVVGNSTSLLSPYLHFGEISVRHVFQCARMKQIIWARDKNSEGEESADLFLRGIGLREYSRYICF
NFPFTHEQSLLSHLRFFPWDADVDKFKAWRQGRTGYPLVDAGMRELWATGWMHNRIRVIVSSFAVKFLLLPWKWG
MKYFWDTLLDADLECDILGWQYISGSIPDGHELDRLDNPALQGAKYDPEGEYIRQWLPELARLPTEWIHHPWDAPLTV
LKASGVELGTNYAKPIVDIDTARELLAKAISRTRGAQIMIGAAARDPPVATMVSKGEEDNMAIIKEFMRFKVHMEGSVN
GHEFEIEGEGEGRPYEGTQTAKLKVTKGGPLPFAWDILSPQFMYGSKAYVKHPADIPDYLKLSFPEGFKWERVMNFED
GGVVTVTQDSSLQDGEFIYKVKLRGTNFPSDGPVMQKKTMGWEASSERMYPEDGALKGEIKQRLKLKDGGHYDAEV
KTTYKAKKPVQLPGAYNVNIKLDITSHNEDYTIVEQYERAEGRHSTGGMDELYK
SEQ ID NO: 20. mCherry-Cry2olig-TDP-43^{(AA274-414)}:
MVSKGEEDNMAIIKEFMRFKVHMEGSVNGHEFEIEGEGEGRPYEGTQTAKLKVTKGGPLPFAWDILSPQFMYGSKAY
VKHPADIPDYLKLSFPEGFKWERVMNFEDGGVVTVTQDSSLQDGEFIYKVKLRGTNFPSDGPVMQKKTMGWEASSER
MYPEDGALKGEIKQRLKLKDGGHYDAEVKTTYKAKKPVQLPGAYNVNIKLDITSHNEDYTIVEQYERAEGRHSTGGMD
ELYK
MKMDKKTIVWFRRDLRIEDNPALAAAAHEGSVFPVFIWCPEEEGQFYPGRASRWWMKQSLAHLSQSLKALGSDLTLI
KTHNTISAILDCIRVTGATKVVFNHLYDPVSLVRDHTVKEKLVERGISVQSYNGDLLYEPWEIYCEKGKPFTSFNSYWKKC
LDMSIESVMLPPPWRLMPITAAAEAIWACSIEELGLENEAEKPSNALLTRAWSPGWSNADKLLNEFIEKQLIDYAKNSK
KVVGNSTSLLSPYLHFGEISVRHVFQCARMKQIIWARDKNSEGEESADLFLRGIGLREYSRYICFNFPFTHEQSLLSHLRFF
PWDADVDKFKAWRQGRTGYPLVDAGMRELWATGWMHNRIRVIVSSFAVKFLLLPWKWGMKYFWDTLLDADLEC
DILGWQYISGSIPDGHELDRLDNPALQGAKYDPEGEYIRQWLPELARLPTEWIHHPWDAPLTVLKASGVELGTNYAKPI
VDIDTARELLAKAISRTRGAQIMIGAAARGGRFGGNPGGFGNQGGFGNSRGGGAGLGNNQGSNMGGGMNFGAFSI
NPAMMAAAQAALQSSWGMMGMLASQQNQSGPSGNNQNQGNMQREPNQAFGSGNNSYSGSNSGAAIGWGSA
SNAGSGSGFNGGFGSSMDSKSSGWGM
SEQ ID NO: 21. mCherry-Cry2olig-TDP-43^{(AA191-414)}:
MVSKGEEDNMAIIKEFMRFKVHMEGSVNGHEFEIEGEGEGRPYEGTQTAKLKVTKGGPLPFAWDILSPQFMYGSKAY
VKHPADIPDYLKLSFPEGFKWERVMNFEDGGVVTVTQDSSLQDGEFIYKVKLRGTNFPSDGPVMQKKTMGWEASSER
MYPEDGALKGEIKQRLKLKDGGHYDAEVKTTYKAKKPVQLPGAYNVNIKLDITSHNEDYTIVEQYERAEGRHSTGGMD
ELYK
MKMDKKTIVWFRRDLRIEDNPALAAAAHEGSVFPVFIWCPEEEGQFYPGRASRWWMKQSLAHLSQSLKALGSDLTLI
KTHNTISAILDCIRVTGATKVVFNHLYDPVSLVRDHTVKEKLVERGISVQSYNGDLLYEPWEIYCEKGKPFTSFNSYWKKC
LDMSIESVMLPPPWRLMPITAAAEAIWACSIEELGLENEAEKPSNALLTRAWSPGWSNADKLLNEFIEKQLIDYAKNSK
KVVGNSTSLLSPYLHFGEISVRHVFQCARMKQIIWARDKNSEGEESADLFLRGIGLREYSRYICFNFPFTHEQSLLSHLRFF
PWDADVDKFKAWRQGRTGYPLVDAGMRELWATGWMHNRIRVIVSSFAVKFLLLPWKWGMKYFWDTLLDADLEC
DILGWQYISGSIPDGHELDRLDNPALQGAKYDPEGEYIRQWLPELARLPTEWIHHPWDAPLTVLKASGVELGTNYAKPI
VDIDTARELLAKAISRTRGAQIMIGAAARGRKVFVGRCTEDMTEDELREFFSQYGDVMDVFIPKPFRAFAFVTFADDQI
AQSLCGEDLIIKGISVHISNAEPKHNSNRQLERSGRFGGNPGGFGNQGGFGNSRGGGAGLGNNQGSNMGGGMNFG
AFSINPAMMAAAQAALQSSWGMMGMLASQQNQSGPSGNNQNQGNMQREPNQAFGSGNNSYSGSNSGAAIGW
GSASNAGSGSGFNGGFGSSMDSKSSGWGM
SEQ ID NO: 22. mCherry-Cry2olig-TDP-43^{(AA105-414)}:
MVSKGEEDNMAIIKEFMRFKVHMEGSVNGHEFEIEGEGEGRPYEGTQTAKLKVTKGGPLPFAWDILSPQFMYGSKAY
VKHPADIPDYLKLSFPEGFKWERVMNFEDGGVVTVTQDSSLQDGEFIYKVKLRGTNFPSDGPVMQKKTMGWEASSER
MYPEDGALKGEIKQRLKLKDGGHYDAEVKTTYKAKKPVQLPGAYNVNIKLDITSHNEDYTIVEQYERAEGRHSTGGMD
ELYKMKMDKKTIVWFRRDLRIEDNPALAAAAHEGSVFPVFIWCPEEEGQFYPGRASRWWMKQSLAHLSQSLKALGSD
LTLIKTHNTISAILDCIRVTGATKVVFNHLYDPVSLVRDHTVKEKLVERGISVQSYNGDLLYEPWEIYCEKGKPFTSFNSYW
KKCLDMSIESVMLPPPWRLMPITAAAEAIWACSIEELGLENEAEKPSNALLTRAWSPGWSNADKLLNEFIEKQLIDYAK
NSKKVVGNSTSLLSPYLHFGEISVRHVFQCARMKQIIWARDKNSEGEESADLFLRGIGLREYSRYICFNFPFTHEQSLLSHL
RFFPWDADVDKFKAWRQGRTGYPLVDAGMRELWATGWMHNRIRVIVSSFAVKFLLLPWKWGMKYFWDTLLDADL
ECDILGWQYISGSIPDGHELDRLDNPALQGAKYDPEGEYIRQWLPELARLPTEWIHHPWDAPLTVLKASGVELGTNYAK
PIVDIDTARELLAKAISRTRGAQIMIGAAARGDLIVLGLPWKTTEQDLKEYFSTFGEVLMVQVKKDLKTGHSKGFGFVRF
TEYETQVKVMSQRHMIDGRWCDCKLPNSKQSQDEPLRSRKVFVGRCTEDMTEDELREFFSQYGDVMDVFIPKPFRAF
AFVTFADDQIAQSLCGEDLIIKGISVHISNAEPKHNSNRQLERSGRFGGNPGGFGNQGGFGNSRGGGAGLGNNQGSN
MGGGMNFGAFSINPAMMAAAQAALQSSWGMMGMLASQQNQSGPSGNNQNQGNMQREPNQAFGSGNNSYS
GSNSGAAIGWGSASNAGSGSGFNGGFGSSMDSKSSGWGM
SEQ ID NO: 23. Cry2olig-TDP-43^{(AA274-414)}-mCherry:
MKMDKKTIVWFRRDLRIEDNPALAAAAHEGSVFPVFIWCPEEEGQFYPGRASRWWMKQSLAHLSQSLKALGSDLTLI
KTHNTISAILDCIRVTGATKVVFNHLYDPVSLVRDHTVKEKLVERGISVQSYNGDLLYEPWEIYCEKGKPFTSFNSYWKKC
LDMSIESVMLPPPWRLMPITAAAEAIWACSIEELGLENEAEKPSNALLTRAWSPGWSNADKLLNEFIEKQLIDYAKNSK
KVVGNSTSLLSPYLHFGEISVRHVFQCARMKQIIWARDKNSEGEESADLFLRGIGLREYSRYICFNFPFTHEQSLLSHLRFF
PWDADVDKFKAWRQGRTGYPLVDAGMRELWATGWMHNRIRVIVSSFAVKFLLLPWKWGMKYFWDTLLDADLEC
DILGWQYISGSIPDGHELDRLDNPALQGAKYDPEGEYIRQWLPELARLPTEWIHHPWDAPLTVLKASGVELGTNYAKPI
VDIDTARELLAKAISRTRGAQIMIGAAARGGRFGGNPGGFGNQGGFGNSRGGGAGLGNNQGSNMGGGMNFGAFSI
NPAMMAAAQAALQSSWGMMGMLASQQNQSGPSGNNQNQGNMQREPNQAFGSGNNSYSGSNSGAAIGWGSA
SNAGSGSGFNGGFGSSMDSKSSGWGMSRDPPVATMVSKGEEDNMAIIKEFMRFKVHMEGSVNGHEFEIEGEGEGR
PYEGTQTAKLKVTKGGPLPFAWDILSPQFMYGSKAYVKHPADIPDYLKLSFPEGFKWERVMNFEDGGVVTVTQDSSLQ
DGEFIYKVKLRGTNFPSDGPVMQKKTMGWEASSERMYPEDGALKGEIKQRLKLKDGGHYDAEVKTTYKAKKPVQLPG
AYNVNIKLDITSHNEDYTIVEQYERAEGRHSTGGMDELYK
SEQ ID NO: 24. Cry2olig-TDP-43^{(AA191-414)}-mCherry:
MKMDKKTIVWFRRDLRIEDNPALAAAAHEGSVFPVFIWCPEEEGQFYPGRASRWWMKQSLAHLSQSLKALGSDLTLI
KTHNTISAILDCIRVTGATKVVFNHLYDPVSLVRDHTVKEKLVERGISVQSYNGDLLYEPWEIYCEKGKPFTSFNSYWKKC
LDMSIESVMLPPPWRLMPITAAAEAIWACSIEELGLENEAEKPSNALLTRAWSPGWSNADKLLNEFIEKQLIDYAKNSK
KVVGNSTSLLSPYLHFGEISVRHVFQCARMKQIIWARDKNSEGEESADLFLRGIGLREYSRYICFNFPFTHEQSLLSHLRFF
PWDADVDKFKAWRQGRTGYPLVDAGMRELWATGWMHNRIRVIVSSFAVKFLLLPWKWGMKYFWDTLLDADLEC
DILGWQYISGSIPDGHELDRLDNPALQGAKYDPEGEYIRQWLPELARLPTEWIHHPWDAPLTVLKASGVELGTNYAKPI
VDIDTARELLAKAISRTRGAQIMIGAAARGRKVFVGRCTEDMTEDELREFFSQYGDVMDVFIPKPFRAFAFVTFADDQ1
AQSLCGEDLIIKGISVHISNAEPKHNSNRQLERSGRFGGNPGGFGNQGGFGNSRGGGAGLGNNQGSNMGGGMNFG
AFSINPAMMAAAQAALQSSWGMMGMLASQQNQSGPSGNNQNQGNMQREPNQAFGSGNNSYSGSNSGAAIGW
GSASNAGSGSGFNGGFGSSMDSKSSGWGMSRDPPVATMVSKGEEDNMAIIKEFMRFKVHMEGSVNGHEFEIEGEG
EGRPYEGTQTAKLKVTKGGPLPFAWDILSPQFMYGSKAYVKHPADIPDYLKLSFPEGFKWERVMNFEDGGVVTVTQDS
SLQDGEFIYKVKLRGTNFPSDGPVMQKKTMGWEASSERMYPEDGALKGEIKQRLKLKDGGHYDAEVKTTYKAKKPVQ
LPGAYNVNIKLDITSHNEDYTIVEQYERAEGRHSTGGMDELYK
SEQ ID NO: 25. Cry2olig-TDP-43^{(AA105-414)}-mCherry:
MDLIVLGLPWKTTEQDLKEYFSTFGEVLMVQVKKDLKTGHSKGFGFVRFTEYETQVKVMSQRHMIDGRWCDCKLPNS
KQSQDEPLRSRKVFVGRCTEDMTEDELREFFSQYGDVMDVFIPKPFRAFAFVTFADDQIAQSLCGEDLIIKGISVHISNAE
PKHNSNRQLERSGRFGGNPGGFGNQGGFGNSRGGGAGLGNNQGSNMGGGMNFGAFSINPAMMAAAQAALQSS
WGMMGMLASQQNQSGPSGNNQNQGNMQREPNQAFGSGNNSYSGSNSGAAIGWGSASNAGSGSGFNGGFGSS
MDSKSSGWGMLEATMKMDKKTIVWFRRDLRIEDNPALAAAAHEGSVFPVFIWCPEEEGQFYPGRASRWWMKQSL
AHLSQSLKALGSDLTLIKTHNTISAILDCIRVTGATKVVFNHLYDPVSLVRDHTVKEKLVERGISVQSYNGDLLYEPWEIYC
EKGKPFTSFNSYWKKCLDMSIESVMLPPPWRLMPITAAAEAIWACSIEELGLENEAEKPSNALLTRAWSPGWSNADKL
LNEFIEKQLIDYAKNSKKVVGNSTSLLSPYLHFGEISVRHVFQCARMKQIIWARDKNSEGEESADLFLRGIGLREYSRYICF
NFPFTHEQSLLSHLRFFPWDADVDKFKAWRQGRTGYPLVDAGMRELWATGWMHNRIRVIVSSFAVKFLLLPWKWG
MKYFWDTLLDADLECDILGWQYISGSIPDGHELDRLDNPALQGAKYDPEGEYIRQWLPELARLPTEWIHHPWDAPLTV
LKASGVELGTNYAKPIVDIDTARELLAKAISRTRGAQIMIGAASRDPPVATMVSKGEEDNMAIIKEFMRFKVHMEGSVN
GHEFEIEGEGEGRPYEGTQTAKLKVTKGGPLPFAWDILSPQFMYGSKAYVKHPADIPDYLKLSFPEGFKWERVMNFED
GGVVTVTQDSSLQDGEFIYKVKLRGTNFPSDGPVMQKKTMGWEASSERMYPEDGALKGEIKQRLKLKDGGHYDAEV
KTTYKAKKPVQLPGAYNVNIKLDITSHNEDYTIVEQYERAEGRHSTGGMDELYK
2.NcVVDY50W Fusion Proteins Amino Acid Sequences:
A) Full length TDP-43 Protein no reporter
SEQ ID NO: 26. NcVVDY50W-TDP-43
MHTLYAPGGYDIMGWLIQIMNRPNPQVELGPVDTSCALILCDLKQKDTPIVYASEAFLYMTGYSNAEVLGRNCRFLQS
PDGMVKPKSTRKYVDSNTINTMRKAIDRNAEVQVEVVNFKKNGQRFVNFLTMIPVRDETGEYRYSMGFQCETEAMS
EYIRVTEDENDEPIEIPSEDDGTVLLSTVTAQFPGACGLRYRNPVSQCMRGVRLVEGILHAPDAGWGNLVYVVNYPKD
NKRKMDETDASSAVKVKRAVQKTSDLIVLGLPWKTTEQDLKEYFSTFGEVLMVQVKKDLKTGHSKGFGFVRFTEYETQ
VKVMSQRHMIDGRWCDCKLPNSKQSQDEPLRSRKVFVGRCTEDMTEDELREFFSQYGDVMDVFIPKPFRAFAFVTFA
DDQIAQSLCGEDLIIKGISVHISNAEPKHNSNRQLERSGRFGGNPGGFGNQGGFGNSRGGGAGLGNNQGSNMGGG
MNFGAFSINPAMMAAAQAALQSSWGMMGMLASQQNQSGPSGNNQNQGNMQREPNQAFGSGNNSYSGSNSG
AAIGWGSASNAGSGSGFNGGFGSSMDSKSSGWGM
SEQ ID NO: 27. TDP-43-NcVVDY50W
MSEYIRVTEDENDEPIEIPSEDDGTVLLSTVTAQFPGACGLRYRNPVSQCMRGVRLVEGILHAPDAGWGNLVYVVNYP
KDNKRKMDETDASSAVKVKRAVQKTSDLIVLGLPWKTTEQDLKEYFSTFGEVLMVQVKKDLKTGHSKGFGFVRFTEYE
TQVKVMSQRHMIDGRWCDCKLPNSKQSQDEPLRSRKVFVGRCTEDMTEDELREFFSQYGDVMDVFIPKPFRAFAFVT
FADDQIAQSLCGEDLIIKGISVHISNAEPKHNSNRQLERSGRFGGNPGGFGNQGGFGNSRGGGAGLGNNQGSNMGG
GMNFGAFSINPAMMAAAQAALQSSWGMMGMLASQQNQSGPSGNNQNQGNMQREPNQAFGSGNNSYSGSNS
GAAIGWGSASNAGSGSGFNGGFGSSMDSKSSGWGMFRAQRHTLYAPGGYDIMGWLIQIMNRPNPQVELGPVDTS
CALILCDLKQKDTPIVYASEAFLYMTGYSNAEVLGRNCRFLQSPDGMVKPKSTRKYVDSNTINTMRKAIDRNAEVQVEV
VNFKKNGQRFVNFLTMIPVRDETGEYRYSMGFQCETE
B) Truncated TDP-43 protein no reporter
SEQ ID NO: 28. TDP-43^{(AA105-414)}-NcVVDY50W
MDLIVLGLPWKTTEQDLKEYFSTFGEVLMVQVKKDLKTGHSKGFGFVRFTEYETQVKVMSQRHMIDGRWCDCKLPNS
KQSQDEPLRSRKVFVGRCTEDMTEDELREFFSQYGDVMDVFIPKPFRAFAFVTFADDQ1AQSLCGEDLIIKGISVHISNAE
PKHNSNRQLERSGRFGGNPGGFGNQGGFGNSRGGGAGLGNNQGSNMGGGMNFGAFSINPAMMAAAQAALQSS
WGMMGMLASQQNQSGPSGNNQNQGNMQREPNQAFGSGNNSYSGSNSGAAIGWGSASNAGSGSGFNGGFGSS
MDSKSSGWGMFRAQRHTLYAPGGYDIMGWLIQIMNRPNPQVELGPVDTSCALILCDLKQKDTPIVYASEAFLYMTGY
SNAEVLGRNCRFLQSPDGMVKPKSTRKYVDSNTINTMRKAIDRNAEVQVEVVNFKKNGQRFVNFLTMIPVRDETGEY
RYSMGFQCETE
SEQ ID NO: 29. TDP-43^{(AA191-414)}-NcVVDY50W
MRKVFVGRCTEDMTEDELREFFSQYGDVMDVFIPKPFRAFAFVTFADDQIAQSLCGEDLIIKGISVHISNAEPKHNSNR
QLERSGRFGGNPGGFGNQGGFGNSRGGGAGLGNNQGSNMGGGMNFGAFSINPAMMAAAQAALQSSWGMMG
MLASQQNQSGPSGNNQNQGNMQREPNQAFGSGNNSYSGSNSGAAIGWGSASNAGSGSGFNGGFGSSMDSKSSG
WGMFRAQRHTLYAPGGYDIMGWLIQIMNRPNPQVELGPVDTSCALILCDLKQKDTPIVYASEAFLYMTGYSNAEVLG
RNCRFLQSPDGMVKPKSTRKYVDSNTINTMRKAIDRNAEVQVEVVNFKKNGQRFVNFLTMIPVRDETGEYRYSMGFQ
CETE
SEQ ID NO: 30. TDP-43^{(AA274-414)}-NcVVDY50W
MGRFGGNPGGFGNQGGFGNSRGGGAGLGNNQGSNMGGGMNFGAFSINPAMMAAAQAALQSSWGMMGMLA
SQQNQSGPSGNNQNQGNMQREPNQAFGSGNNSYSGSNSGAAIGWGSASNAGSGSGFNGGFGSSMDSKSSGWG
MFRAQRHTLYAPGGYDIMGWLIQIMNRPNPQVELGPVDTSCALILCDLKQKDTPIVYASEAFLYMTGYSNAEVLGRNC
RFLQSPDGMVKPKSTRKYVDSNTINTMRKAIDRNAEVQVEVVNFKKNGQRFVNFLTMIPVRDETGEYRYSMGFQCET
E
SEQ ID NO: 31. NcVVDY50W-TDP-43^{(AA105-414)}
MHTLYAPGGYDIMGWLIQIMNRPNPQVELGPVDTSCALILCDLKQKDTPIVYASEAFLYMTGYSNAEVLGRNCRFLQS
PDGMVKPKSTRKYVDSNTINTMRKAIDRNAEVQVEVVNFKKNGQRFVNFLTMIPVRDETGEYRYSMGFQCETEADLI
VLGLPWKTTEQDLKEYFSTFGEVLMVQVKKDLKTGHSKGFGFVRFTEYETQVKVMSQRHMIDGRWCDCKLPNSKQS
QDEPLRSRKVFVGRCTEDMTEDELREFFSQYGDVMDVFIPKPFRAFAFVTFADDQIAQSLCGEDLIIKGISVHISNAEPKH
NSNRQLERSGRFGGNPGGFGNQGGFGNSRGGGAGLGNNQGSNMGGGMNFGAFSINPAMMAAAQAALQSSWG
MMGMLASQQNQSGPSGNNQNQGNMQREPNQAFGSGNNSYSGSNSGAAIGWGSASNAGSGSGFNGGFGSSMD
SKSSGWGM
SEQ ID NO: 32. NcVVDY50W-TDP-43^{(AA191-414)}
MHTLYAPGGYDIMGWLIQIMNRPNPQVELGPVDTSCALILCDLKQKDTPIVYASEAFLYMTGYSNAEVLGRNCRFLQS
PDGMVKPKSTRKYVDSNTINTMRKAIDRNAEVQVEVVNFKKNGQRFVNFLTMIPVRDETGEYRYSMGFQCETEARKV
FVGRCTEDMTEDELREFFSQYGDVMDVFIPKPFRAFAFVTFADDQIAQSLCGEDLIIKGISVHISNAEPKHNSNRQLERS
GRFGGNPGGFGNQGGFGNSRGGGAGLGNNQGSNMGGGMNFGAFSINPAMMAAAQAALQSSWGMMGMLAS
QQNQSGPSGNNQNQGNMQREPNQAFGSGNNSYSGSNSGAAIGWGSASNAGSGSGFNGGFGSSMDSKSSGWGM
SEQ ID NO: 33. NcVVDY50W-TDP-43^{(AA274-414)}
HTLYAPGGYDIMGWLIQIMNRPNPQVELGPVDTSCALILCDLKQKDTPIVYASEAFLYMTGYSNAEVLGRNCRFLQSPD
GMVKPKSTRKYVDSNTINTMRKAIDRNAEVQVEVVNFKKNGQRFVNFLTMIPVRDETGEYRYSMGFQCETEAGRFGG
NPGGFGNQGGFGNSRGGGAGLGNNQGSNMGGGMNFGAFSINPAMMAAAQAALQSSWGMMGMLASQQNQS
GPSGNNQNQGNMQREPNQAFGSGNNSYSGSNSGAAIGWGSASNAGSGSGFNGGFGSSMDSKSSGWGM
C) Full length TDP-43 Protein + mCherry Reporter
SEQ ID NO: 34. NcVVDY50W-TDP-43-mCherry
MHTLYAPGGYDIMGWLIQIMNRPNPQVELGPVDTSCALILCDLKQKDTPIVYASEAFLYMTGYSNAEVLGRNCRFLQS
PDGMVKPKSTRKYVDSNTINTMRKAIDRNAEVQVEVVNFKKNGQRFVNFLTMIPVRDETGEYRYSMGFQCETEAMS
EYIRVTEDENDEPIEIPSEDDGTVLLSTVTAQFPGACGLRYRNPVSQCMRGVRLVEGILHAPDAGWGNLVYVVNYPKD
NKRKMDETDASSAVKVKRAVQKTSDLIVLGLPWKTTEQDLKEYFSTFGEVLMVQVKKDLKTGHSKGFGFVRFTEYETQ
VKVMSQRHMIDGRWCDCKLPNSKQSQDEPLRSRKVFVGRCTEDMTEDELREFFSQYGDVMDVFIPKPFRAFAFVTFA
DDQIAQSLCGEDLIIKGISVHISNAEPKHNSNRQLERSGRFGGNPGGFGNQGGFGNSRGGGAGLGNNQGSNMGGG
MNFGAFSINPAMMAAAQAALQSSWGMMGMLASQQNQSGPSGNNQNQGNMQREPNQAFGSGNNSYSGSNSG
AAIGWGSASNAGSGSGFNGGFGSSMDSKSSGWGMFAPVATMVSKGEEDNMAIIKEFMRFKVHMEGSVNGHEFEIE
GEGEGRPYEGTQTAKLKVTKGGPLPFAWDILSPQFMYGSKAYVKHPADIPDYLKLSFPEGFKWERVMNFEDGGVVTVT
QDSSLQDGEFIYKVKLRGTNFPSDGPVMQKKTMGWEASSERMYPEDGALKGEIKQRLKLKDGGHYDAEVKTTYKAKK
PVQLPGAYNVNIKLDITSHNEDYTIVEQYERAEGRHSTGGMDELYK
SEQ ID NO: 35. mCherry-TDP-43-NcVVDY50W
MVSKGEEDNMAIIKEFMRFKVHMEGSVNGHEFEIEGEGEGRPYEGTQTAKLKVTKGGPLPFAWDILSPQFMYGSKAY
VKHPADIPDYLKLSFPEGFKWERVMNFEDGGVVTVTQDSSLQDGEFIYKVKLRGTNFPSDGPVMQKKTMGWEASSER
MYPEDGALKGEIKQRLKLKDGGHYDAEVKTTYKAKKPVQLPGAYNVNIKLDITSHNEDYTIVEQYERAEGRHSTGGMD
ELYKSGLKMSEYIRVTEDENDEPIEIPSEDDGTVLLSTVTAQFPGACGLRYRNPVSQCMRGVRLVEGILHAPDAGWGNL
VYVVNYPKDNKRKMDETDASSAVKVKRAVQKTSDLIVLGLPWKTTEQDLKEYFSTFGEVLMVQVKKDLKTGHSKGFGF
VRFTEYETQVKVMSQRHMIDGRWCDCKLPNSKQSQDEPLRSRKVFVGRCTEDMTEDELREFFSQYGDVMDVFIPKPF
RAFAFVTFADDQIAQSLCGEDLIIKGISVHISNAEPKHNSNRQLERSGRFGGNPGGFGNQGGFGNSRGGGAGLGNNQ
GSNMGGGMNFGAFSINPAMMAAAQAALQSSWGMMGMLASQQNQSGPSGNNQNQGNMQREPNQAFGSGNN
SYSGSNSGAAIGWGSASNAGSGSGFNGGFGSSMDSKSSGWGMFRAQRHTLYAPGGYDIMGWLIQIMNRPNPQVEL
GPVDTSCALILCDLKQKDTPIVYASEAFLYMTGYSNAEVLGRNCRFLQSPDGMVKPKSTRKYVDSNTINTMRKAIDRNA
EVQVEVVNFKKNGQRFVNFLTMIPVRDETGEYRYSMGFQCETE
D) Truncated TDP-43 protein + mCherry Reporter
SEQ ID NO: 36. mCherry-TDP-43^{(AA105-414)}-NcVVDY50W
MVSKGEEDNMAIIKEFMRFKVHMEGSVNGHEFEIEGEGEGRPYEGTQTAKLKVTKGGPLPFAWDILSPQFMYGSKAY
VKHPADIPDYLKLSFPEGFKWERVMNFEDGGVVTVTQDSSLQDGEFIYKVKLRGTNFPSDGPVMQKKTMGWEASSER
MYPEDGALKGEIKQRLKLKDGGHYDAEVKTTYKAKKPVQLPGAYNVNIKLDITSHNEDYTIVEQYERAEGRHSTGGMD
ELYKSGLKDLIVLGLPWKTTEQDLKEYFSTFGEVLMVQVKKDLKTGHSKGFGFVRFTEYETQVKVMSQRHMIDGRWCD
CKLPNSKQSQDEPLRSRKVFVGRCTEDMTEDELREFFSQYGDVMDVFIPKPFRAFAFVTFADDQIAQSLCGEDLIIKGIS
VHISNAEPKHNSNRQLERSGRFGGNPGGFGNQGGFGNSRGGGAGLGNNQGSNMGGGMNFGAFSINPAMMAAA
QAALQSSWGMMGMLASQQNQSGPSGNNQNQGNMQREPNQAFGSGNNSYSGSNSGAAIGWGSASNAGSGSGF
NGGFGSSMDSKSSGWGMFRAQRHTLYAPGGYDIMGWLIQIMNRPNPQVELGPVDTSCALILCDLKQKDTPIVYASEA
FLYMTGYSNAEVLGRNCRFLQSPDGMVKPKSTRKYVDSNTINTMRKAIDRNAEVQVEVVNFKKNGQRFVNFLTMIPV
RDETGEYRYSMGFQCETE
SEQ ID NO: 37. mCherry-TDP-43^{(AA191-414)}-NcVVDY50W
MVSKGEEDNMAIIKEFMRFKVHMEGSVNGHEFEIEGEGEGRPYEGTQTAKLKVTKGGPLPFAWDILSPQFMYGSKAY
VKHPADIPDYLKLSFPEGFKWERVMNFEDGGVVTVTQDSSLQDGEFIYKVKLRGTNFPSDGPVMQKKTMGWEASSER
MYPEDGALKGEIKQRLKLKDGGHYDAEVKTTYKAKKPVQLPGAYNVNIKLDITSHNEDYTIVEQYERAEGRHSTGGMD
ELYKSGLKRKVFVGRCTEDMTEDELREFFSQYGDVMDVFIPKPFRAFAFVTFADDQIAQSLCGEDLIIKGISVHISNAEPK
HNSNRQLERSGRFGGNPGGFGNQGGFGNSRGGGAGLGNNQGSNMGGGMNFGAFSINPAMMAAAQAALQSSW
GMMGMLASQQNQSGPSGNNQNQGNMQREPNQAEGSGNNSYSGSNSGAAIGWGSASNAGSGSGENGGEGSSM
DSKSSGWGMFRAQRHTLYAPGGYDIMGWLIQIMNRPNPQVELGPVDTSCALILCDLKQKDTPIVYASEAFLYMTGYS
NAEVLGRNCRFLQSPDGMVKPKSTRKYVDSNTINTMRKAIDRNAEVQVEVVNFKKNGQRFVNFLTMIPVRDETGEYR
YSMGFQCETE
SEQ ID NO: 38. mCherry-TDP-43^{(AA274-414)}-NcVVDY50W
MVSKGEEDNMAIIKEFMRFKVHMEGSVNGHEFEIEGEGEGRPYEGTQTAKLKVTKGGPLPFAWDILSPQFMYGSKAY
VKHPADIPDYLKLSFPEGFKWERVMNFEDGGVVTVTQDSSLQDGEFIYKVKLRGTNFPSDGPVMQKKTMGWEASSER
MYPEDGALKGEIKQRLKLKDGGHYDAEVKTTYKAKKPVQLPGAYNVNIKLDITSHNEDYTIVEQYERAEGRHSTGGMD
ELYKSGLKGRFGGNPGGFGNQGGFGNSRGGGAGLGNNQGSNMGGGMNFGAFSINPAMMAAAQAALQSSWGM
MGMLASQQNQSGPSGNNQNQGNMQREPNQAFGSGNNSYSGSNSGAAIGWGSASNAGSGSGFNGGFGSSMDSK
SSGWGMFRAQRHTLYAPGGYDIMGWLIQIMNRPNPQVELGPVDTSCALILCDLKQKDTPIVYASEAFLYMTGYSNAE
VLGRNCRFLQSPDGMVKPKSTRKYVDSNTINTMRKAIDRNAEVQVEVVNFKKNGQRFVNFLTMIPVRDETGEYRYSM
GFQCETE
SEQ ID NO: 39. NcVVDY50W-TDP-43^{(AA105-414)}-mCherry
MHTLYAPGGYDIMGWLIQIMNRPNPQVELGPVDTSCALILCDLKQKDTPIVYASEAFLYMTGYSNAEVLGRNCRFLQS
PDGMVKPKSTRKYVDSNTINTMRKAIDRNAEVQVEVVNFKKNGQRFVNFLTMIPVRDETGEYRYSMGFQCETEADLI
VLGLPWKTTEQDLKEYFSTFGEVLMVQVKKDLKTGHSKGFGFVRFTEYETQVKVMSQRHMIDGRWCDCKLPNSKQS
QDEPLRSRKVFVGRCTEDMTEDELREFFSQYGDVMDVFIPKPFRAFAFVTFADDQIAQSLCGEDLIIKGISVHISNAEPKH
NSNRQLERSGRFGGNPGGFGNQGGFGNSRGGGAGLGNNQGSNMGGGMNFGAFSINPAMMAAAQAALQSSWG
MMGMLASQQNQSGPSGNNQNQGNMQREPNQAFGSGNNSYSGSNSGAAIGWGSASNAGSGSGFNGGFGSSMD
SKSSGWGMFAPVATMVSKGEEDNMAIIKEFMRFKVHMEGSVNGHEFEIEGEGEGRPYEGTQTAKLKVTKGGPLPFA
WDILSPQFMYGSKAYVKHPADIPDYLKLSFPEGFKWERVMNFEDGGVVTVTQDSSLQDGEFIYKVKLRGTNFPSDGPV
MQKKTMGWEASSERMYPEDGALKGEIKQRLKLKDGGHYDAEVKTTYKAKKPVQLPGAYNVNIKLDITSHNEDYTIVEQ
YERAEGRHSTGGMDELYK
SEQ ID NO: 40. NcVVDY50W-TDP-43^{(AA191-414)}-mCherry
MHTLYAPGGYDIMGWLIQIMNRPNPQVELGPVDTSCALILCDLKQKDTPIVYASEAFLYMTGYSNAEVLGRNCRFLQS
PDGMVKPKSTRKYVDSNTINTMRKAIDRNAEVQVEVVNFKKNGQRFVNFLTMIPVRDETGEYRYSMGFQCETEARKV
FVGRCTEDMTEDELREFFSQYGDVMDVFIPKPFRAFAFVTFADDQIAQSLCGEDLIIKGISVHISNAEPKHNSNRQLERS
GRFGGNPGGFGNQGGFGNSRGGGAGLGNNQGSNMGGGMNFGAFSINPAMMAAAQAALQSSWGMMGMLAS
QQNQSGPSGNNQNQGNMQREPNQAFGSGNNSYSGSNSGAAIGWGSASNAGSGSGFNGGFGSSMDSKSSGWGM
FAPVATMVSKGEEDNMAIIKEFMRFKVHMEGSVNGHEFEIEGEGEGRPYEGTQTAKLKVTKGGPLPFAWDILSPQFM
YGSKAYVKHPADIPDYLKLSFPEGFKWERVMNFEDGGVVTVTQDSSLQDGEFIYKVKLRGTNFPSDGPVMQKKTMG
WEASSERMYPEDGALKGEIKQRLKLKDGGHYDAEVKTTYKAKKPVQLPGAYNVNIKLDITSHNEDYTIVEQYERAEGRH
STGGMDELYK
SEQ ID NO: 41. NcVVDY50W-TDP-43^{(AA274-414)}-mCherry
MHTLYAPGGYDIMGWLIQIMNRPNPQVELGPVDTSCALILCDLKQKDTPIVYASEAFLYMTGYSNAEVLGRNCRFLQS
PDGMVKPKSTRKYVDSNTINTMRKAIDRNAEVQVEVVNFKKNGQRFVNFLTMIPVRDETGEYRYSMGFQCETEAGRF
GGNPGGFGNQGGFGNSRGGGAGLGNNQGSNMGGGMNFGAFSINPAMMAAAQAALQSSWGMMGMLASQQN
QSGPSGNNQNQGNMQREPNQAFGSGNNSYSGSNSGAAIGWGSASNAGSGSGFNGGFGSSMDSKSSGWGMFAP
VATMVSKGEEDNMAIIKEFMRFKVHMEGSVNGHEFEIEGEGEGRPYEGTQTAKLKVTKGGPLPFAWDILSPQFMYGS
KAYVKHPADIPDYLKLSFPEGFKWERVMNFEDGGVVTVTQDSSLQDGEFIYKVKLRGTNFPSDGPVMQKKTMGWEA
SSERMYPEDGALKGEIKQRLKLKDGGHYDAEVKTTYKAKKPVQLPGAYNVNIKLDITSHNEDYTIVEQYERAEGRHSTG
GMDELYK
Alpha Synuclein Protein Arrangements Generated:
1. Cry2olig Fusion Proteins Amino Acid Sequences:
A) Full Length alpha synuclein (asyn) Protein No Reporter
SEQ ID NO: 42. Cry2olig-asyn
MKMDKKTIVWFRRDLRIEDNPALAAAAHEGSVFPVFIWCPEEEGQFYPGRASRWWMKQSLAHLSQSLKALGSDLTLI
KTHNTISAILDCIRVTGATKVVFNHLYDPVSLVRDHTVKEKLVERGISVQSYNGDLLYEPWEIYCEKGKPFTSFNSYWKKC
LDMSIESVMLPPPWRLMPITAAAEAIWACSIEELGLENEAEKPSNALLTRAWSPGWSNADKLLNEFIEKQLIDYAKNSK
KVVGNSTSLLSPYLHFGEISVRHVFQCARMKQIIWARDKNSEGEESADLFLRGIGLREYSRYICFNFPFTHEQSLLSHLRFF
PWDADVDKFKAWRQGRTGYPLVDAGMRELWATGWMHNRIRVIVSSFAVKFLLLPWKWGMKYFWDTLLDADLEC
DILGWQYISGSIPDGHELDRLDNPALQGAKYDPEGEYIRQWLPELARLPTEWIHHPWDAPLTVLKASGVELGTNYAKPI
VDIDTARELLAKAISRTRGAQIMIGAAAMDVFMKGLSKAKEGVVAAAEKTKQGVAEAAGKTKEGVLYVGSKTKEGVVH
GVATVAEKTKEQVTNVGGAVVTGVTAVAQKTVEGAGSIAAATGFVKKDQLGKNEEGAPQEGILEDMPVDPDNEAYE
MPSEEGYQDYEPEA
SEQ ID NO: 43. Asyn-Cry2
MDVFMKGLSKAKEGVVAAAEKTKQGVAEAAGKTKEGVLYVGSKTKEGVVHGVATVAEKTKEQVTNVGGAVVTGVTA
VAQKTVEGAGSIAAATGFVKKDQLGKNEEGAPQEGILEDMPVDPDNEAYEMPSEEGYQDYEPEADPPVATMKMDKK
TIVWFRRDLRIEDNPALAAAAHEGSVFPVFIWCPEEEGQFYPGRASRWWMKQSLAHLSQSLKALGSDLTLIKTHNTISA
ILDCIRVTGATKVVFNHLYDPVSLVRDHTVKEKLVERGISVQSYNGDLLYEPWEIYCEKGKPFTSFNSYWKKCLDMSIESV
MLPPPWRLMPITAAAEAIWACSIEELGLENEAEKPSNALLTRAWSPGWSNADKLLNEFlEKQLIDYAKNSKKVVGNSTS
LLSPYLHFGEISVRHVFQCARMKQIIWARDKNSEGEESADLFLRGIGLREYSRYICFNFPFTHEQSLLSHLRFFPWDADVD
KFKAWRQGRTGYPLVDAGMRELWATGWMHNRIRVIVSSFAVKFLLLPWKWGMKYFWDTLLDADLECDILGWQYIS
GSIPDGHELDRLDNPALQGAKYDPEGEYIRQWLPELARLPTEWIHHPWDAPLTVLKASGVELGTNYAKPIVDIDTARELL
AKAISRTRGAQIMIGAA
B) Full Length alpha synuclein (asyn) Protein + mCherry Reporter
SEQ ID NO: 44. Cry2olig-asyn-mCherry
MKMDKKTIVWFRRDLRIEDNPALAAAAHEGSVFPVFIWCPEEEGQFYPGRASRWWMKQSLAHLSQSLKALGSDLTLI
KTHNTISAILDCIRVTGATKVVFNHLYDPVSLVRDHTVKEKLVERGISVQSYNGDLLYEPWEIYCEKGKPFTSFNSYWKKC
LDMSIESVMLPPPWRLMPITAAAEAIWACSIEELGLENEAEKPSNALLTRAWSPGWSNADKLLNEFIEKQLIDYAKNSK
KVVGNSTSLLSPYLHFGEISVRHVFQCARMKQIIWARDKNSEGEESADLFLRGIGLREYSRYICFNFPFTHEQSLLSHLRFF
PWDADVDKFKAWRQGRTGYPLVDAGMRELWATGWMHNRIRVIVSSFAVKFLLLPWKWGMKYFWDTLLDADLEC
DILGWQYISGSIPDGHELDRLDNPALQGAKYDPEGEYIRQWLPELARLPTEWIHHPWDAPLTVLKASGVELGTNYAKPI
VDIDTARELLAKAISRTRGAQIMIGAAAMDVFMKGLSKAKEGVVAAAEKTKQGVAEAAGKTKEGVLYVGSKTKEGVVH
GVATVAEKTKEQVTNVGGAVVTGVTAVAQKTVEGAGSIAAATGFVKKDQLGKNEEGAPQEGILEDMPVDPDNEAYE
MPSEEGYQDYEPEADPPVATMVSKGEEDNMAIIKEFMRFKVHMEGSVNGHEFEIEGEGEGRPYEGTQTAKLKVTKGG
PLPFAWDILSPQFMYGSKAYVKHPADIPDYLKLSFPEGFKWERVMNFEDGGVVTVTQDSSLQDGEFIYKVKLRGTNFPS
DGPVMQKKTMGWEASSERMYPEDGALKGEIKQRLKLKDGGHYDAEVKTTYKAKKPVQLPGAYNVNIKLDITSHNEDY
TIVEQYERAEGRHSTGGMDELYK
SEQ ID NO: 45. Cry2olig-mCherry-Asyn
MKMDKKTIVWFRRDLRIEDNPALAAAAHEGSVFPVFIWCPEEEGQFYPGRASRWWMKQSLAHLSQSLKALGSDLTLI
KTHNTISAILDCIRVTGATKVVFNHLYDPVSLVRDHTVKEKLVERGISVQSYNGDLLYEPWEIYCEKGKPFTSFNSYWKKC
LDMSIESVMLPPPWRLMPITAAAEAIWACSIEELGLENEAEKPSNALLTRAWSPGWSNADKLLNEFIEKQLIDYAKNSK
KVVGNSTSLLSPYLHFGEISVRHVFQCARMKQIIWARDKNSEGEESADLFLRGIGLREYSRYICFNFPFTHEQSLLSHLRFF
PWDADVDKFKAWRQGRTGYPLVDAGMRELWATGWMHNRIRVIVSSFAVKFLLLPWKWGMKYFWDTLLDADLEC
DILGWQYISGSIPDGHELDRLDNPALQGAKYDPEGEYIRQWLPELARLPTEWIHHPWDAPLTVLKASGVELGTNYAKPI
VDIDTARELLAKAISRTRGAQIMIGAAARDPPVATMVSKGEEDNMAIIKEFMRFKVHMEGSVNGHEFEIEGEGEGRPY
EGTQTAKLKVTKGGPLPFAWDILSPQFMYGSKAYVKHPADIPDYLKLSFPEGFKWERVMNFEDGGVVTVTQDSSLQD
GEFIYKVKLRGTNFPSDGPVMQKKTMGWEASSERMYPEDGALKGEIKQRLKLKDGGHYDAEVKTTYKAKKPVQLPGA
YNVNIKLDITSHNEDYTIVEQYERAEGRHSTGGMDELYKMDVFMKGLSKAKEGVVAAAEKTKQGVAEAAGKTKEGVLY
VGSKTKEGVVHGVATVAEKTKEQVTNVGGAVVTGVTAVAQKTVEGAGSIAAATGFVKKDQLGKNEEGAPQEGILED
MPVDPDNEAYEMPSEEGYQDYEPEA
SEQ ID NO: 46. Asyn-Cry2-mCherry
MDVFMKGLSKAKEGVVAAAEKTKQGVAEAAGKTKEGVLYVGSKTKEGVVHGVATVAEKTKEQVTNVGGAVVTGVTA
VAQKTVEGAGSIAAATGFVKKDQLGKNEEGAPQEGILEDMPVDPDNEAYEMPSEEGYQDYEPEADPPVATMKMDKK
TIVWFRRDLRIEDNPALAAAAHEGSVFPVFIWCPEEEGQFYPGRASRWWMKQSLAHLSQSLKALGSDLTLIKTHNTISA
ILDCIRVTGATKVVFNHLYDPVSLVRDHTVKEKLVERGISVQSYNGDLLYEPWEIYCEKGKPFTSFNSYWKKCLDMSIESV
MLPPPWRLMPITAAAEAIWACSIEELGLENEAEKPSNALLTRAWSPGWSNADKLLNEFIEKQLIDYAKNSKKVVGNSTS
LLSPYLHFGEISVRHVFQCARMKQIIWARDKNSEGEESADLFLRGIGLREYSRYICFNFPFTHEQSLLSHLRFFPWDADVD
KFKAWRQGRTGYPLVDAGMRELWATGWMHNRIRVIVSSFAVKFLLLPWKWGMKYFWDTLLDADLECDILGWQYIS
GSIPDGHELDRLDNPALQGAKYDPEGEYIRQWLPELARLPTEWIHHPWDAPLTVLKASGVELGTNYAKPIVDIDTARELL
AKAISRTRGAQIMIGAAAMVSKGEEDNMAIIKEFMRFKVHMEGSVNGHEFEIEGEGEGRPYEGTQTAKLKVTKGGPLP
FAWDILSPQFMYGSKAYVKHPADIPDYLKLSFPEGFKWERVMNFEDGGVVTVTQDSSLQDGEFIYKVKLRGTNFPSDG
PVMQKKTMGWEASSERMYPEDGALKGEIKQRLKLKDGGHYDAEVKTTYKAKKPVQLPGAYNVNIKLDITSHNEDYTIV
EQYERAEGRHSTGGMDELYK
1. NcVVD Fusion Proteins Amino Acid Sequences:
A) Full Length alpha synuclein (asyn) Protein No Reporter
SEQ ID NO: 47. Asyn-NcVVDY50W
MDVFMKGLSKAKEGVVAAAEKTKQGVAEAAGKTKEGVLYVGSKTKEGVVHGVATVAEKTKEQVTNVGGAVVTGVTA
VAQKTVEGAGSIAAATGFVKKDQLGKNEEGAPQEGILEDMPVDPDNEAYEMPSEEGYQDYEPEAFHTLYAPGGYDIM
GWLIQIMNRPNPQVELGPVDTSCALILCDLKQKDTPIVYASEAFLYMTGYSNAEVLGRNCRFLQSPDGMVKPKSTRKYV
DSNTINTMRKAIDRNAEVQVEVVNFKKNGQRFVNFLTMIPVRDETGEYRYSMGFQCETE
SEQ ID NO: 48. NcVVDY50W-Asyn
MHTLYAPGGYDIMGWLIQIMNRPNPQVELGPVDTSCALILCDLKQKDTPIVYASEAFLYMTGYSNAEVLGRNCRFLQS
PDGMVKPKSTRKYVDSNTINTMRKAIDRNAEVQVEVVNFKKNGQRFVNFLTMIPVRDETGEYRYSMGFQCETEAMD
VFMKGLSKAKEGVVAAAEKTKQGVAEAAGKTKEGVLYVGSKTKEGVVHGVATVAEKTKEQVTNVGGAVVTGVTAVA
QKTVEGAGSIAAATGFVKKDQLGKNEEGAPQEGILEDMPVDPDNEAYEMPSEEGYQDYEPEA
B) Full Length alpha synuclein (asyn) Protein + mCherry Reporter
SEQ ID NO: 49. mCherry-Asyn-NcVVDY50W
MVSKGEEDNMAIIKEFMRFKVHMEGSVNGHEFEIEGEGEGRPYEGTQTAKLKVTKGGPLPFAWDILSPQFMYGSKAY
VKHPADIPDYLKLSFPEGFKWERVMNFEDGGVVTVTQDSSLQDGEFIYKVKLRGTNFPSDGPVMQKKTMGWEASSER
MYPEDGALKGEIKQRLKLKDGGHYDAEVKTTYKAKKPVQLPGAYNVNIKLDITSHNEDYTIVEQYERAEGRHSTGGMD
ELYSKMDVFMKGLSKAKEGVVAAAEKTKQGVAEAAGKTKEGVLYVGSKTKEGVVHGVATVAEKTKEQVTNVGGAVV
TGVTAVAQKTVEGAGSIAAATGFVKKDQLGKNEEGAPQEGILEDMPVDPDNEAYEMPSEEGYQDYEPEAFHTLYAPG
GYDIMGWLIQIMNRPNPQVELGPVDTSCALILCDLKQKDTPIVYASEAFLYMTGYSNAEVLGRNCRFLQSPDGMVKPK
STRKYVDSNTINTMRKAIDRNAEVQVEVVNFKKNGQRFVNFLTMIPVRDETGEYRYSMGFQCETE
SEQ ID NO: 50. mCherry-NcVVDY50W-Asyn
MVSKGEEDNMAIIKEFMRFKVHMEGSVNGHEFEIEGEGEGRPYEGTQTAKLKVTKGGPLPFAWDILSPQFMYGSKAY
VKHPADIPDYLKLSFPEGFKWERVMNFEDGGVVTVTQDSSLQDGEFIYKVKLRGTNFPSDGPVMQKKTMGWEASSER
MYPEDGALKGEIKQRLKLKDGGHYDAEVKTTYKAKKPVQLPGAYNVNIKLDITSHNEDYTIVEQYERAEGRHSTGGMD
ELYKSGLRSRAQRHTLYAPGGYDIMGWLIQIMNRPNPQVELGPVDTSCALILCDLKQKDTPIVYASEAFLYMTGYSNAE
VLGRNCRFLQSPDGMVKPKSTRKYVDSNTINTMRKAIDRNAEVQVEVVNFKKNGQRFVNFLTMIPVRDETGEYRYSM
GFQCETEALEFCSRRYRGPMDVFMKGLSKAKEGVVAAAEKTKQGVAEAAGKTKEGVLYVGSKTKEGVVHGVATVAEK
TKEQVTNVGGAVVTGVTAVAQKTVEGAGSIAAATGFVKKDQLGKNEEGAPQEGILEDMPVDPDNEAYEMPSEEGYQ
DYEPEA
SEQ ID NO: 51. NcVVDY50W-Asyn-mCherry
MHTLYAPGGYDIMGWLIQIMNRPNPQVELGPVDTSCALILCDLKQKDTPIVYASEAFLYMTGYSNAEVLGRNCRFLQS
PDGMVKPKSTRKYVDSNTINTMRKAIDRNAEVQVEVVNFKKNGQRFVNFLTMIPVRDETGEYRYSMGFQCETEAMD
VFMKGLSKAKEGVVAAAEKTKQGVAEAAGKTKEGVLYVGSKTKEGVVHGVATVAEKTKEQVTNVGGAVVTGVTAVA
QKTVEGAGSIAAATGFVKKDQLGKNEEGAPQEGILEDMPVDPDNEAYEMPSEEGYQDYEPEAFAPVATMVSKGEED
NMAIIKEFMRFKVHMEGSVNGHEFEIEGEGEGRPYEGTQTAKLKVTKGGPLPFAWDILSPQFMYGSKAYVKHPADIPD
YLKLSFPEGFKWERVMNFEDGGVVTVTQDSSLQDGEFIYKVKLRGTNFPSDGPVMQKKTMGWEASSERMYPEDGAL
KGEIKQRLKLKDGGHYDAEVKTTYKAKKPVQLPGAYNVNIKLDITSHNEDYTIVEQYERAEGRHSTGGMDELYK
SEQ ID NO: 52. Alphasynuclein-mCherry-NcVVD (wildtype)
MDVFMKGLSKAKEGVVAAAEKTKQGVAEAAGKTKEGVLYVGSKTKEGVVHGVATVAEKTKEQVTNVGGAVVTGVTA
VAQKTVEGAGSIAAATGFVKKDQLGKNEEGAPQEGILEDMPVDPDNEAYEMPSEEGYQDYEPEALLPVATMVSKGEE
DNMAIIKEFMRFKVHMEGSVNGHEFEIEGEGEGRPYEGTQTAKLKVTKGGPLPFAWDILSPQFMYGSKAYVKHPADIP
DYLKLSFPEGFKWERVMNFEDGGVVTVTQDSSLQDGEFIYKVKLRGTNFPSDGPVMQKKTMGWEASSERMYPEDGA
LKGEIKQRLKLKDGGHYDAEVKTTYKAKKPVQLPGAYNVNIKLDITSHNEDYTIVEQYERAEGRHSTGGMDELYKSGLRS
RAQASNSAVDGTAGPMHTLYAPGGYDIMGYLIQIMNRPNPQVELGPVDTSCALILCDLKQKDTPIVYASEAFLYMTGY
2SNAEVLGRNCRFLQSPDGMVKPKSTRKYVDSNTINTMRKAIDRNAEVQVEVVNFKKNGQRFVNFLTMIPVRDETGE
YRYSMGFQCETEGIHRI*
SEQ ID NO: 53. mCherry-alphasynuclein-NcVVD (wildtype)
MVSKGEEDNMAIIKEFMRFKVHMEGSVNGHEFEIEGEGEGRPYEGTQTAKLKVTKGGPLPFAWDILSPQFMYGSKAY
VKHPADIPDYLKLSFPEGFKWERVMNFEDGGVVTVTQDSSLQDGEFIYKVKLRGTNFPSDGPVMQKKTMGWEASSER
MYPEDGALKGElKQRLKLKDGGHYDAEVKTTYKAKKPVQLPGAYNVNIKLDITSHNEDYTIVEQYERAEGRHSTGGMD
ELYKSGLRSRAQMDVFMKGLSKAKEGVVAAAEKTKQGVAEAAGKTKEGVLYVGSKTKEGVVHGVATVAEKTKEQVTN
VGGAVVTGVTAVAQKTVEGAGSIAAATGFVKKDQLGKNEEGAPQEGILEDMPVDPDNEAYEMPSEEGYQDYEPEAS
NSAVDGTAGPMHTLYAPGGYDIMGYLIQIMNRPNPQVELGPVDTSCALILCDLKQKDTPIVYASEAFLYMTGYSNAEVL
GRNCRFLQSPDGMVKPKSTRKYVDSNTINTMRKAIDRNAEVQVEVVNFKKNGQRFVNFLTMIPVRDETGEYRYSMGF
QCETEGIHRI*
SEQ ID NO: 54. mCherry-NcVVD (wildtype)-alphasynuclein
MVSKGEEDNMAIIKEFMRFKVHMEGSVNGHEFEIEGEGEGRPYEGTQTAKLKVTKGGPLPFAWDILSPQFMYGSKAY
VKHPADIPDYLKLSFPEGFKWERVMNFEDGGVVTVTQDSSLQDGEFIYKVKLRGTNFPSDGPVMQKKTMGWEASSER
MYPEDGALKGEIKQRLKLKDGGHYDAEVKTTYKAKKPVQLPGAYNVNIKLDITSHNEDYTIVEQYERAEGRHSTGGMD
ELYKSGLRSRAQASNSAVDGTAGPMHTLYAPGGYDIMGYLIQIMNRPNPQVELGPVDTSCALILCDLKQKDTPIVYASE
AFLYMTGYSNAEVLGRNCRFLQSPDGMVKPKSTRKYVDSNTINTMRKAIDRNAEVQVEVVNFKKNGQRFVNFLTMIP
VRDETGEYRYSMGFQCETEGMDVFMKGLSKAKEGVVAAAEKTKQGVAEAAGKTKEGVLYVGSKTKEGVVHGVATVA
EKTKEQVTNVGGAVVTGVTAVAQKTVEGAGSIAAATGFVKKDQLGKNEEGAPQEGILEDMPVDPDNEAYEMPSEEG
YQDYEPEAHRI*
Tau
SEQ ID NO: 55. mCherry-Tau
MVSKGEEDNMAIIKEFMRFKVHMEGSVNGHEFEIEGEGEGRPYEGTQTAKLKVTKGGPLPFAWDILSPQFMYGSKAY
VKHPADIPDYLKLSFPEGFKWERVMNFEDGGVVTVTQDSSLQDGEFIYKVKLRGTNFPSDGPVMQKKTMGWEASSER
MYPEDGALKGEIKQRLKLKDGGHYDAEVKTTYKAKKPVQLPGAYNVNIKLDITSHNEDYTIVEQYERAEGRHSTGGMD
ELYKSGLRSRAQASNSAVDGTAGPMAEPRQEFEVMEDHAGTYGLGDRKDQGGYTMHQDQEGDTDAGLKESPLQTP
TEDGSEEPGSETSDAKSTPTAEDVTAPLVDEGAPGKQAAAQPHTEIPEGTTAEEAGIGDTPSLEDEAAGHVTQARMVS
KSKDGTGSDDKKAKGADGKTKIATPRGAAPPGQKGQANATRIPAKTPPAPKTPPSSGEPPKSGDRSGYSSPGSPGTPG
SRSRTPSLPTPPTREPKKVAVVRTPPKSPSSAKSRLQTAPVPMPDLKNVKSKIGSTENLKHQPGGGKVQIINKKLDLSNV
QSKCGSKDNIKHVPGGGSVQIVYKPVDLSKVTSKCGSLGNIHHKPGGGQVEVKSEKLDFKDRVQSKIGSLDNITHVPGG
GNKKIETHKLTFRENAKAKTDHGAEIVYKSPVVSGDTSPRHLSNVSSTGSIDMVDSPQLATLADEVSASLAKQGLGIHRI*
SEQ ID NO: 56. mCherry-VfAU-Tau
MVSKGEEDNMAIIKEFMRFKVHMEGSVNGHEFEIEGEGEGRPYEGTQTAKLKVTKGGPLPFAWDILSPQFMYGSKAY
VKHPADIPDYLKLSFPEGFKWERVMNFEDGGVVTVTQDSSLQDGEFIYKVKLRGTNFPSDGPVMQKKTMGWEASSER
MYPEDGALKGEIKQRLKLKDGGHYDAEVKTTYKAKKPVQLPGAYNVNIKLDITSHNEDYTIVEQYERAEGRHSTGGMD
ELYKSGLRSRAQASNSAVDGTAGPMPDYSLVKALQMAQQNFVITDASLPDNPIVYASRGFLTLTGYSLDQILGRNCRFL
QGPETDPRAVDKIRNAITKGVDTSVCLLNYRQDGTTFWNLFFVAGLRDSKGNIVNYVGVQSKVSEDYAKLLVNEQNIEY
KGVRTSNMLRRKPGGIHRIMAEPRQEFEVMEDHAGTYGLGDRKDQGGYTMHQDQEGDTDAGLKESPLQTPTEDGS
EEPGSETSDAKSTPTAEDVTAPLVDEGAPGKQAAAQPHTEIPEGTTAEEAGIGDTPSLEDEAAGHVTQARMVSKSKDG
TGSDDKKAKGADGKTKIATPRGAAPPGQKGQANATRIPAKTPPAPKTPPSSGEPPKSGDRSGYSSPGSPGTPGSRSRTP
SLPTPPTREPKKVAVVRTPPKSPSSAKSRLQTAPVPMPDLKNVKSKIGSTENLKHQPGGGKVQIINKKLDLSNVQSKCGS
KDNIKHVPGGGSVQIVYKPVDLSKVTSKCGSLGNIHHKPGGGQVEVKSEKLDFKDRVQSKIGSLDNITHVPGGGNKKIET
HKLTFRENAKAKTDHGAEIVYKSPVVSGDTSPRHLSNVSSTGSIDMVDSPQLATLADEVSASLAKQGLITDHNQPYHICR
GFTCFKKPPTPPPEPET*
SEQ ID NO: 57. mCherry-(y50w)-Tau
MVSKGEEDNMAIIKEFMRFKVHMEGSVNGHEFEIEGEGEGRPYEGTQTAKLKVTKGGPLPFAWDILSPQFMYGSKAY
VKHPADIPDYLKLSFPEGFKWERVMNFEDGGVVTVTQDSSLQDGEFIYKVKLRGTNFPSDGPVMQKKTMGWEASSER
MYPEDGALKGEIKQRLKLKDGGHYDAEVKTTYKAKKPVQLPGAYNVNIKLDITSHNEDYTIVEQYERAEGRHSTGGMD
ELYKSGLRSRAQASNSAVDGTAGPMHTLYAPGGYDIMGWLIQIMNRPNPQVELGPVDTSCALILCDLKQKDTPIVYAS
EAFLYMTGYSNAEVLGRNCRFLQSPDGMVKPKSTRKYVDSNTINTMRKAIDRNAEVQVEVVNFKKNGQRFVNFLTMI
PVRDETGEYRYSMGFQCETEGMAEPRQEFEVMEDHAGTYGLGDRKDQGGYTMHQDQEGDTDAGLKESPLQTPTED
GSEEPGSETSDAKSTPTAEDVTAPLVDEGAPGKQAAAQPHTEIPEGTTAEEAGIGDTPSLEDEAAGHVTQARMVSKSK
DGTGSDDKKAKGADGKTKIATPRGAAPPGQKGQANATRIPAKTPPAPKTPPSSGEPPKSGDRSGYSSPGSPGTPGSRS
RTPSLPTPPTREPKKVAVVRTPPKSPSSAKSRLQTAPVPMPDLKNVKSKIGSTENLKHQPGGGKVQIINKKLDLSNVQSK
CGSKDNIKHVPGGGSVQIVYKPVDLSKVTSKCGSLGNIHHKPGGGQVEVKSEKLDFKDRVQSKIGSLDNITHVPGGGNK
KIETHKLTFRENAKAKTDHGAEIVYKSPVVSGDTSPRHLSNVSSTGSIDMVDSPQLATLADEVSASLAKQGLHRI*
SEQ ID NO: 58. mCherry-Tau-NcVVD(y50w)
MVSKGEEDNMAIIKEFMRFKVHMEGSVNGHEFEIEGEGEGRPYEGTQTAKLKVTKGGPLPFAWDILSPQFMYGSKAY
VKHPADIPDYLKLSFPEGFKWERVMNFEDGGVVTVTQDSSLQDGEFIYKVKLRGTNFPSDGPVMQKKTMGWEASSER
MYPEDGALKGEIKQRLKLKDGGHYDAEVKTTYKAKKPVQLPGAYNVNIKLDITSHNEDYTIVEQYERAEGRHSTGGMD
ELYKSGLTMAEPRQEFEVMEDHAGTYGLGDRKDQGGYTMHQDQEGDTDAGLKESPLQTPTEDGSEEPGSETSDAKS
TPTAEDVTAPLVDEGAPGKQAAAQPHTEIPEGTTAEEAGIGDTPSLEDEAAGHVTQARMVSKSKDGTGSDDKKAKGA
DGKTKIATPRGAAPPGQKGQANATRIPAKTPPAPKTPPSSGEPPKSGDRSGYSSPGSPGTPGSRSRTPSLPTPPTREPKK
VAVVRTPPKSPSSAKSRLQTAPVPMPDLKNVKSKIGSTENLKHQPGGGKVQIINKKLDLSNVQSKCGSKDNIKHVPGGG
SVQIVYKPVDLSKVTSKCGSLGNIHHKPGGGQVEVKSEKLDFKDRVQSKIGSLDNITHVPGGGNKKIETHKLTFRENAKA
KTDHGAEIVYKSPVVSGDTSPRHLSNVSSTGSIDMVDSPQLATLADEVSASLAKQGLRRAQRHTLYAPGGYDIMGWLI
QIMNRPNPQVELGPVDTSCALILCDLKQKDTPIVYASEAFLYMTGYSNAEVLGRNCRFLQSPDGMVKPKSTRKYVDSNT
INTMRKAIDRNAEVQVEVVNFKKNGQRFVNFLTMIPVRDETGEYRYSMGFQCETEALEFCSRRYRGPGIHRI*
SEQ ID NO: 59. mCherry-NcVVD(y50w)-Tau
MVSKGEEDNMAIIKEFMRFKVHMEGSVNGHEFEIEGEGEGRPYEGTQTAKLKVTKGGPLPFAWDILSPQFMYGSKAY
VKHPADIPDYLKLSFPEGFKWERVMNFEDGGVVTVTQDSSLQDGEFIYKVKLRGTNFPSDGPVMQKKTMGWEASSER
MYPEDGALKGEIKQRLKLKDGGHYDAEVKTTYKAKKPVQLPGAYNVNIKLDITSHNEDYTIVEQYERAEGRHSTGGMD
ELYKSGLRSRAQRHTLYAPGGYDIMGWLIQIMNRPNPQVELGPVDTSCALILCDLKQKDTPIVYASEAFLYMTGYSNAE
VLGRNCRFLQSPDGMVKPKSTRKYVDSNTINTMRKAIDRNAEVQVEVVNFKKNGQRFVNFLTMIPVRDETGEYRYSM
GFQCETEALAMAEPRQEFEVMEDHAGTYGLGDRKDQGGYTMHQDQEGDTDAGLKESPLQTPTEDGSEEPGSETSDA
KSTPTAEDVTAPLVDEGAPGKQAAAQPHTEIPEGTTAEEAGIGDTPSLEDEAAGHVTQARMVSKSKDGTGSDDKKAKG
ADGKTKIATPRGAAPPGQKGQANATRIPAKTPPAPKTPPSSGEPPKSGDRSGYSSPGSPGTPGSRSRTPSLPTPPTREPK
KVAVVRTPPKSPSSAKSRLQTAPVPMPDLKNVKSKIGSTENLKHQPGGGKVQIINKKLDLSNVQSKCGSKDNIKHVPGG
GSVQIVYKPVDLSKVTSKCGSLGNIHHKPGGGQVEVKSEKLDFKDRVQSKIGSLDNITHVPGGGNKKIETHKLTFRENAK
AKTDHGAEIVYKSPVVSGDTSPRHLSNVSSTGSIDMVDSPQLATLADEVSASLAKQGLRCSRRYRGPGIHRI*
SEQ ID NO: 60. Tau-mCherry-NcVVD(y50w)
MAEPRQEFEVMEDHAGTYGLGDRKDQGGYTMHQDQEGDTDAGLKESPLQTPTEDGSEEPGSETSDAKSTPTAEDVT
APLVDEGAPGKQAAAQPHTEIPEGTTAEEAGIGDTPSLEDEAAGHVTQARMVSKSKDGTGSDDKKAKGADGKTKIATP
RGAAPPGQKGQANATRIPAKTPPAPKTPPSSGEPPKSGDRSGYSSPGSPGTPGSRSRTPSLPTPPTREPKKVAVVRTPPK
SPSSAKSRLQTAPVPMPDLKNVKSKIGSTENLKHQPGGGKVQIINKKLDLSNVQSKCGSKDNIKHVPGGGSVQIVYKPV
DLSKVTSKCGSLGNIHHKPGGGQVEVKSEKLDFKDRVQSKIGSLDNITHVPGGGNKKIETHKLTFRENAKAKTDHGAEIV
YKSPVVSGDTSPRHLSNVSSTGSIDMVDSPQLATLADEVSASLAKQGLALPVATMVSKGEEDNMAIIKEFMRFKVHME
GSVNGHEFEIEGEGEGRPYEGTQTAKLKVTKGGPLPFAWDILSPQFMYGSKAYVKHPADIPDYLKLSFPEGFKWERVM
NFEDGGVVTVTQDSSLQDGEFIYKVKLRGTNFPSDGPVMQKKTMGWEASSERMYPEDGALKGEIKQRLKLKDGGHY
DAEVKTTYKAKKPVQLPGAYNVNIKLDITSHNEDYTIVEQYERAEGRHSTGGMDELYKSGLRSRAQRHTLYAPGGYDIM
GWLIQIMNRPNPQVELGPVDTSCALILCDLKQKDTPIVYASEAFLYMTGYSNAEVLGRNCRFLQSPDGMVKPKSTRKYV
DSNTINTMRKAIDRNAEVQVEVVNFKKNGQRFVNFLTMIPVRDETGEYRYSMGFQCETEALEFCSRRYRGPGIHRI*
SEQ ID NO: 61. Cry-mCherry-Tau
MKMDKKTIVWFRRDLRIEDNPALAAAAHEGSVFPVFIWCPEEEGQFYPGRASRWWMKQSLAHLSQSLKALGSDLTLI
KTHNTISAILDCIRVTGATKVVFNHLYDPVSLVRDHTVKEKLVERGISVQSYNGDLLYEPWEIYCEKGKPFTSFNSYWKKC
LDMSIESVMLPPPWRLMPITAAAEAIWACSIEELGLENEAEKPSNALLTRAWSPGWSNADKLLNEFIEKQLIDYAKNSK
KVVGNSTSLLSPYLHFGEISVRHVFQCARMKQIIWARDKNSEGEESADLFLRGIGLREYSRYICFNFPFTHEQSLLSHLRFF
PWDADVDKFKAWRQGRTGYPLVDAGMRELWATGWMHNRIRVIVSSFAVKFLLLPWKWGMKYFWDTLLDADLEC
DILGWQYISGSIPDGHELDRLDNPALQGAKYDPEGEYIRQWLPELARLPTEWIHHPWDAPLTVLKASGVELGTNYAKPI
VDIDTARELLAKAISRTRGAQIMIGAAARDPPVATMVSKGEEDNMAIIKEFMRFKVHMEGSVNGHEFEIEGEGEGRPY
EGTQTAKLKVTKGGPLPFAWDILSPQFMYGSKAYVKHPADIPDYLKLSFPEGFKWERVMNFEDGGVVTVTQDSSLQD
GEFIYKVKLRGTNFPSDGPVMQKKTMGWEASSERMYPEDGALKGEIKQRLKLKDGGHYDAEVKTTYKAKKPVQLPGA
YNVNIKLDITSHNEDYTIVEQYERAEGRHSTGGMDELYKSRMAEPRQEFEVMEDHAGTYGLGDRKDQGGYTMHQDQ
EGDTDAGLKESPLQTPTEDGSEEPGSETSDAKSTPTAEDVTAPLVDEGAPGKQAAAQPHTEIPEGTTAEEAGIGDTPSLE
DEAAGHVTQARMVSKSKDGTGSDDKKAKGADGKTKIATPRGAAPPGQKGQANATRIPAKTPPAPKTPPSSGEPPKSG
DRSGYSSPGSPGTPGSRSRTPSLPTPPTREPKKVAVVRTPPKSPSSAKSRLQTAPVPMPDLKNVKSKIGSTENLKHQPGG
GKVQIINKKLDLSNVQSKCGSKDNIKHVPGGGSVQIVYKPVDLSKVTSKCGSLGNIHHKPGGGQVEVKSEKLDFKDRVQ
SKIGSLDNITHVPGGGNKKIETHKLTFRENAKAKTDHGAEIVYKSPVVSGDTSPRHLSNVSSTGSIDMVDSPQLATLADE
VSASLAKQGLGDSRS*
SEQ ID NO: 62. Tau-mCherry
MAEPRQEFEVMEDHAGTYGLGDRKDQGGYTMHQDQEGDTDAGLKESPLQTPTEDGSEEPGSETSDAKSTPTAEDVT
APLVDEGAPGKQAAAQPHTEIPEGTTAEEAGIGDTPSLEDEAAGHVTQARMVSKSKDGTGSDDKKAKGADGKTKIATP
RGAAPPGQKGQANATRIPAKTPPAPKTPPSSGEPPKSGDRSGYSSPGSPGTPGSRSRTPSLPTPPTREPKKVAVVRTPPK
SPSSAKSRLQTAPVPMPDLKNVKSKIGSTENLKHQPGGGKVQIINKKLDLSNVQSKCGSKDNIKHVPGGGSVQIVYKPV
DLSKVTSKCGSLGNIHHKPGGGQVEVKSEKLDFKDRVQSKIGSLDNITHVPGGGNKKIETHKLTFRENAKAKTDHGAEIV
YKSPVVSGDTSPRHLSNVSSTGSIDMVDSPQLATLADEVSASLAKQGLFATMVSKGEEDNMAIIKEFMRFKVHMEGSV
NGHEFEIEGEGEGRPYEGTQTAKLKVTKGGPLPFAWDILSPQFMYGSKAYVKHPADIPDYLKLSFPEGFKWERVMNFE
DGGVVTVTQDSSLQDGEFIYKVKLRGTNFPSDGPVMQKKTMGWEASSERMYPEDGALKGEIKQRLKLKDGGHYDAE
VKTTYKAKKPVQLPGAYNVNIKLDITSHNEDYTIVEQYERAEGRHSTGGMDELYKSGLRSRAQASNSAVDGTAGPGSTG
SR*
SEQ ID NO: 63. Tau-Cry2olig-mCherry
MAEPRQEFEVMEDHAGTYGLGDRKDQGGYTMHQDQEGDTDAGLKESPLQTPTEDGSEEPGSETSDAKSTPTAEDVT
APLVDEGAPGKQAAAQPHTEIPEGTTAEEAGIGDTPSLEDEAAGHVTQARMVSKSKDGTGSDDKKAKGADGKTKIATP
RGAAPPGQKGQANATRIPAKTPPAPKTPPSSGEPPKSGDRSGYSSPGSPGTPGSRSRTPSLPTPPTREPKKVAVVRTPPK
SPSSAKSRLQTAPVPMPDLKNVKSKIGSTENLKHQPGGGKVQIINKKLDLSNVQSKCGSKDNIKHVPGGGSVQIVYKPV
DLSKVTSKCGSLGNIHHKPGGGQVEVKSEKLDFKDRVQSKIGSLDNITHVPGGGNKKIETHKLTFRENAKAKTDHGAEIV
YKSPVVSGDTSPRHLSNVSSTGSIDMVDSPQLATLADEVSASLAKQGLALPDSDLEATMKMDKKTIVWFRRDLRIEDNP
ALAAAAHEGSVFPVFIWCPEEEGQFYPGRASRWWMKQSLAHLSQSLKALGSDLTLIKTHNTISAILDCIRVTGATKVVF
NHLYDPVSLVRDHTVKEKLVERGISVQSYNGDLLYEPWEIYCEKGKPFTSFNSYWKKCLDMSIESVMLPPPWRLMPITA
AAEAIWACSIEELGLENEAEKPSNALLTRAWSPGWSNADKLLNEFIEKQLIDYAKNSKKVVGNSTSLLSPYLHFGEISVRH
VFQCARMKQIIWARDKNSEGEESADLFLRGIGLREYSRYICFNFPFTHEQSLLSHLRFFPWDADVDKFKAWRQGRTGYP
LVDAGMRELWATGWMHNRIRVIVSSFAVKFLLLPWKWGMKYFWDTLLDADLECDILGWQYISGSIPDGHELDRLDN
PALQGAKYDPEGEYIRQWLPELARLPTEWIHHPWDAPLTVLKASGVELGTNYAKPIVDIDTARELLAKAISRTRGAQIMI
GAAARDPPVATMVSKGEEDNMAIIKEFMRFKVHMEGSVNGHEFEIEGEGEGRPYEGTQTAKLKVTKGGPLPFAWDIL
SPQFMYGSKAYVKHPADIPDYLKLSFPEGFKWERVMNFEDGGVVTVTQDSSLQDGEFIYKVKLRGTNFPSDGPVMQK
KTMGWEASSERMYPEDGALKGEIKQRLKLKDGGHYDAEVKTTYKAKKPVQLPGAYNVNIKLDITSHNEDYTIVEQYER
AEGRHSTGGMDELYK*
SEQ ID NO: 64. Cry2Olig-Tau-mCherry
MKMDKKTIVWFRRDLRIEDNPALAAAAHEGSVFPVFIWCPEEEGQFYPGRASRWWMKQSLAHLSQSLKALGSDLTLI
KTHNTISAILDCIRVTGATKVVFNHLYDPVSLVRDHTVKEKLVERGISVQSYNGDLLYEPWEIYCEKGKPFTSFNSYWKKC
LDMSIESVMLPPPWRLMPITAAAEAIWACSIEELGLENEAEKPSNALLTRAWSPGWSNADKLLNEFIEKQLIDYAKNSK
KVVGNSTSLLSPYLHFGEISVRHVFQCARMKQIIWARDKNSEGEESADLFLRGIGLREYSRYICFNFPFTHEQSLLSHLRFF
PWDADVDKFKAWRQGRTGYPLVDAGMRELWATGWMHNRIRVIVSSFAVKFLLLPWKWGMKYFWDTLLDADLEC
DILGWQYISGSIPDGHELDRLDNPALQGAKYDPEGEYIRQWLPELARLPTEWIHHPWDAPLTVLKASGVELGTNYAKPI
VDIDTARELLAKAISRTRGAQIMIGAAAPMAEPRQEFEVMEDHAGTYGLGDRKDQGGYTMHQDQEGDTDAGLKESP
LQTPTEDGSEEPGSETSDAKSTPTAEDVTAPLVDEGAPGKQAAAQPHTEIPEGTTAEEAGIGDTPSLEDEAAGHVTQAR
MVSKSKDGTGSDDKKAKGADGKTKIATPRGAAPPGQKGQANATRIPAKTPPAPKTPPSSGEPPKSGDRSGYSSPGSPG
TPGSRSRTPSLPTPPTREPKKVAVVRTPPKSPSSAKSRLQTAPVPMPDLKNVKSKIGSTENLKHQPGGGKVQIINKKLDLS
NVQSKCGSKDNIKHVPGGGSVQIVYKPVDLSKVTSKCGSLGNIHHKPGGGQVEVKSEKLDFKDRVQSKIGSLDNITHVP
GGGNKKIETHKLTFRENAKAKTDHGAEIVYKSPVVSGDTSPRHLSNVSSTGSIDMVDSPQLATLADEVSASLAKQGLGD
PPVATMVSKGEEDNMAIIKEFMRFKVHMEGSVNGHEFEIEGEGEGRPYEGTQTAKLKVTKGGPLPFAWDILSPQFMY
GSKAYVKHPADIPDYLKLSFPEGFKWERVMNFEDGGVVTVTQDSSLQDGEFIYKVKLRGTNFPSDGPVMQKKTMGW
EASSERMYPEDGALKGEIKQRLKLKDGGHYDAEVKTTYKAKKPVQLPGAYNVNIKLDITSHNEDYTIVEQYERAEGRHST
GGMDELYK*
SEQ ID NO: 65. Cry-mCherry-Tau
MKMDKKTIVWFRRDLRIEDNPALAAAAHEGSVFPVFIWCPEEEGQFYPGRASRWWMKQSLAHLSQSLKALGSDLTLI
KTHNTISAILDCIRVTGATKVVFNHLYDPVSLVRDHTVKEKLVERGISVQSYNGDLLYEPWEIYCEKGKPFTSFNSYWKKC
LDMSIESVMLPPPWRLMPITAAAEAIWACSIEELGLENEAEKPSNALLTRAWSPGWSNADKLLNEFIEKQLIDYAKNSK
KVVGNSTSLLSPYLHFGEISVRHVFQCARMKQIIWARDKNSEGEESADLFLRGIGLREYSRYICFNFPFTHEQSLLSHLRFF
PWDADVDKFKAWRQGRTGYPLVDAGMRELWATGWMHNRIRVIVSSFAVKFLLLPWKWGMKYFWDTLLDADLEC
DILGWQYISGSIPDGHELDRLDNPALQGAKYDPEGEYIRQWLPELARLPTEWIHHPWDAPLTVLKASGVELGTNYAKPI
VDIDTARELLAKAISRTRGAQIMIGAAARDPPVATMVSKGEEDNMAIIKEFMRFKVHMEGSVNGHEFEIEGEGEGRPY
EGTQTAKLKVTKGGPLPFAWDILSPQFMYGSKAYVKHPADIPDYLKLSFPEGFKWERVMNFEDGGVVTVTQDSSLQD
GEFIYKVKLRGTNFPSDGPVMQKKTMGWEASSERMYPEDGALKGEIKQRLKLKDGGHYDAEVKTTYKAKKPVQLPGA
YNVNIKLDITSHNEDYTIVEQYERAEGRHSTGGMDELYKSRMAEPRQEFEVMEDHAGTYGLGDRKDQGGYTMHQDQ
EGDTDAGLKESPLQTPTEDGSEEPGSETSDAKSTPTAEDVTAPLVDEGAPGKQAAAQPHTEIPEGTTAEEAGIGDTPSLE
DEAAGHVTQARMVSKSKDGTGSDDKKAKGADGKTKIATPRGAAPPGQKGQANATRIPAKTPPAPKTPPSSGEPPKSG
DRSGYSSPGSPGTPGSRSRTPSLPTPPTREPKKVAVVRTPPKSPSSAKSRLQTAPVPMPDLKNVKSKIGSTENLKHQPGG
GKVQIINKKLDLSNVQSKCGSKDNIKHVPGGGSVQIVYKPVDLSKVTSKCGSLGNIHHKPGGGQVEVKSEKLDFKDRVQ
SKIGSLDNITHVPGGGNKKIETHKLTFRENAKAKTDHGAEIVYKSPVVSGDTSPRHLSNVSSTGSIDMVDSPQLATLADE
VSASLAKQGLGDSRS*
SEQ ID NO: 66. mCherry-Tau-NcVVD(y50w)
MVSKGEEDNMAIIKEFMRFKVHMEGSVNGHEFEIEGEGEGRPYEGTQTAKLKVTKGGPLPFAWDILSPQFMYGSKAY
VKHPADIPDYLKLSFPEGFKWERVMNFEDGGVVTVTQDSSLQDGEFIYKVKLRGTNFPSDGPVMQKKTMGWEASSER
MYPEDGALKGEIKQRLKLKDGGHYDAEVKTTYKAKKPVQLPGAYNVNIKLDITSHNEDYTIVEQYERAEGRHSTGGMD
ELYKSGLTMAEPRQEFEVMEDHAGTYGLGDRKDQGGYTMHQDQEGDTDAGLKESPLQTPTEDGSEEPGSETSDAKS
TPTAEDVTAPLVDEGAPGKQAAAQPHTEIPEGTTAEEAGIGDTPSLEDEAAGHVTQARMVSKSKDGTGSDDKKAKGA
DGKTKIATPRGAAPPGQKGQANATRIPAKTPPAPKTPPSSGEPPKSGDRSGYSSPGSPGTPGSRSRTPSLPTPPTREPKK
VAVVRTPPKSPSSAKSRLQTAPVPMPDLKNVKSKIGSTENLKHQPGGGKVQIINKKLDLSNVQSKCGSKDNIKHVPGGG
SVQIVYKPVDLSKVTSKCGSLGNIHHKPGGGQVEVKSEKLDFKDRVQSKIGSLDNITHVPGGGNKKIETHKLTFRENAKA
KTDHGAEIVYKSPVVSGDTSPRHLSNVSSTGSIDMVDSPQLATLADEVSASLAKQGLRRAQRHTLYAPGGYDIMGWLI
QIMNRPNPQVELGPVDTSCALILCDLKQKDTPIVYASEAFLYMTGYSNAEVLGRNCRFLQSPDGMVKPKSTRKYVDSNT
INTMRKAIDRNAEVQVEVVNFKKNGQRFVNFLTMIPVRDETGEYRYSMGFQCETEALEFCSRRYRGPGIHRI*
SEQ ID NO: 67. mCherry-NcVVD(y50w)-Tau
MVSKGEEDNMAIIKEFMRFKVHMEGSVNGHEFEIEGEGEGRPYEGTQTAKLKVTKGGPLPFAWDILSPQFMYGSKAY
VKHPADIPDYLKLSFPEGFKWERVMNFEDGGVVTVTQDSSLQDGEFIYKVKLRGTNFPSDGPVMQKKTMGWEASSER
MYPEDGALKGEIKQRLKLKDGGHYDAEVKTTYKAKKPVQLPGAYNVNIKLDITSHNEDYTIVEQYERAEGRHSTGGMD
ELYKSGLRSRAQRHTLYAPGGYDIMGWLIQIMNRPNPQVELGPVDTSCALILCDLKQKDTPIVYASEAFLYMTGYSNAE
VLGRNCRFLQSPDGMVKPKSTRKYVDSNTINTMRKAIDRNAEVQVEVVNFKKNGQRFVNFLTMIPVRDETGEYRYSM
GFQCETEALAMAEPRQEFEVMEDHAGTYGLGDRKDQGGYTMHQDQEGDTDAGLKESPLQTPTEDGSEEPGSETSDA
KSTPTAEDVTAPLVDEGAPGKQAAAQPHTEIPEGTTAEEAGIGDTPSLEDEAAGHVTQARMVSKSKDGTGSDDKKAKG
ADGKTKIATPRGAAPPGQKGQANATRIPAKTPPAPKTPPSSGEPPKSGDRSGYSSPGSPGTPGSRSRTPSLPTPPTREPK
KVAVVRTPPKSPSSAKSRLQTAPVPMPDLKNVKSKIGSTENLKHQPGGGKVQIINKKLDLSNVQSKCGSKDNIKHVPGG
GSVQIVYKPVDLSKVTSKCGSLGNIHHKPGGGQVEVKSEKLDFKDRVQSKIGSLDNITHVPGGGNKKIETHKLTFRENAK
AKTDHGAEIVYKSPVVSGDTSPRHLSNVSSTGSIDMVDSPQLATLADEVSASLAKQGLRCSRRYRGPGIHRI*
SEQ ID NO: 68. Cry-Tau
MKMDKKTIVWFRRDLRIEDNPALAAAAHEGSVFPVFIWCPEEEGQFYPGRASRWWMKQSLAHLSQSLKALGSDLTLI
KTHNTISAILDCIRVTGATKVVFNHLYDPVSLVRDHTVKEKLVERGISVQSYNGDLLYEPWEIYCEKGKPFTSFNSYWKKC
LDMSIESVMLPPPWRLMPITAAAEAIWACSIEELGLENEAEKPSNALLTRAWSPGWSNADKLLNEFIEKQLIDYAKNSK
KVVGNSTSLLSPYLHFGEISVRHVFQCARMKQIIWARDKNSEGEESADLFLRGIGLREYSRYICFNFPFTHEQSLLSHLRFF
PWDADVDKFKAWRQGRTGYPLVDAGMRELWATGWMHNRIRVIVSSFAVKFLLLPWKWGMKYFWDTLLDADLEC
DILGWQYISGSIPDGHELDRLDNPALQGAKYDPEGEYIRQWLPELARLPTEWIHHPWDAPLTVLKASGVELGTNYAKPI
VDIDTARELLAKAISRTRGAQIMIGAAAQMAEPRQEFEVMEDHAGTYGLGDRKDQGGYTMHQDQEGDTDAGLKESP
LQTPTEDGSEEPGSETSDAKSTPTAEDVTAPLVDEGAPGKQAAAQPHTEIPEGTTAEEAGIGDTPSLEDEAAGHVTQAR
MVSKSKDGTGSDDKKAKGADGKTKIATPRGAAPPGQKGQANATRIPAKTPPAPKTPPSSGEPPKSGDRSGYSSPGSPG
TPGSRSRTPSLPTPPTREPKKVAVVRTPPKSPSSAKSRLQTAPVPMPDLKNVKSKIGSTENLKHQPGGGKVQIINKKLDLS
NVQSKCGSKDNIKHVPGGGSVQIVYKPVDLSKVTSKCGSLGNIHHKPGGGQVEVKSEKLDFKDRVQSKIGSLDNITHVP
GGGNKKIETHKLTFRENAKAKTDHGAEIVYKSPVVSGDTSPRHLSNVSSTGSIDMVDSPQLATLADEVSASLAKQGLATL
DHNQPYHICRGFTCFKKPPTPPPEPET*
SEQ ID NO: 69. NcVVD(y50w)-Tau
MHTLYAPGGYDIMGWLIQIMNRPNPQVELGPVDTSCALILCDLKQKDTPIVYASEAFLYMTGYSNAEVLGRNCRFLQS
PDGMVKPKSTRKYVDSNTINTMRKAIDRNAEVQVEVVNFKKNGQRFVNFLTMIPVRDETGEMAEPRQEFEVMEDHA
GTYGLGDRKDQGGYTMHQDQEGDTDAGLKESPLQTPTEDGSEEPGSETSDAKSTPTAEDVTAPLVDEGAPGKQAAA
QPHTEIPEGTTAEEAGIGDTPSLEDEAAGHVTQARMVSKSKDGTGSDDKKAKGADGKTKIATPRGAAPPGQKGQANA
TRIPAKTPPAPKTPPSSGEPPKSGDRSGYSSPGSPGTPGSRSRTPSLPTPPTREPKKVAVVRTPPKSPSSAKSRLQTAPVP
MPDLKNVKSKIGSTENLKHQPGGGKVQIINKKLDLSNVQSKCGSKDNIKHVPGGGSVQIVYKPVDLSKVTSKCGSLGNI
HHKPGGGQVEVKSEKLDFKDRVQSKIGSLDNITHVPGGGNKKIETHKLTFRENAKAKTDHGAEIVYKSPVVSGDTSPRH
LSNVSSTGSIDMVDSPQLATLADEVSASLAKQGLHRI*
SEQ ID NO: 70. Tau-Cry
MAEPRQEFEVMEDHAGTYGLGDRKDQGGYTMHQDQEGDTDAGLKESPLQTPTEDGSEEPGSETSDAKSTPTAEDVT
APLVDEGAPGKQAAAQPHTEIPEGTTAEEAGIGDTPSLEDEAAGHVTQARMVSKSKDGTGSDDKKAKGADGKTKIATP
RGAAPPGQKGQANATRIPAKTPPAPKTPPSSGEPPKSGDRSGYSSPGSPGTPGSRSRTPSLPTPPTREPKKVAVVRTPPK
SPSSAKSRLQTAPVPMPDLKNVKSKIGSTENLKHQPGGGKVQIINKKLDLSNVQSKCGSKDNIKHVPGGGSVQIVYKPV
DLSKVTSKCGSLGNIHHKPGGGQVEVKSEKLDFKDRVQSKIGSLDNITHVPGGGNKKIETHKLTFRENAKAKTDHGAEIV
YKSPVVSGDTSPRHLSNVSSTGSIDMVDSPQLATLADEVSASLAKQGLMKMDKKTIVWFRRDLRIEDNPALAAAAHEG
SVFPVFIWCPEEEGQFYPGRASRWWMKQSLAHLSQSLKALGSDLTLIKTHNTISAILDCIRVTGATKVVFNHLYDPVSLV
RDHTVKEKLVERGISVQSYNGDLLYEPWEIYCEKGKPFTSFNSYWKKCLDMSIESVMLPPPWRLMPITAAAEAIWACSI
EELGLENEAEKPSNALLTRAWSPGWSNADKLLNEFIEKQLIDYAKNSKKVVGNSTSLLSPYLHFGEISVRHVFQCARMKQ
IIWARDKNSEGEESADLFLRGIGLREYSRYICFNFPFTHEQSLLSHLRFFPWDADVDKFKAWRQGRTGYPLVDAGMREL
WATGWMHNRIRVIVSSFAVKFLLLPWKWGMKYFWDTLLDADLECDILGWQYISGSIPDGHELDRLDNPALQGAKYD
PEGEYIRQWLPELARLPTEWIHHPWDAPLTVLKASGVELGTNYAKPIVDIDTARELLAKAISRTRGAQIMIGAAATLDHN
QPYHICRGFTCFKKPPTPPPEPET*
SEQ ID NO: 71. Tau-VfAU
MAEPRQEFEVMEDHAGTYGLGDRKDQGGYTMHQDQEGDTDAGLKESPLQTPTEDGSEEPGSETSDAKSTPTAEDVT
APLVDEGAPGKQAAAQPHTEIPEGTTAEEAGIGDTPSLEDEAAGHVTQARMVSKSKDGTGSDDKKAKGADGKTKIATP
RGAAPPGQKGQANATRIPAKTPPAPKTPPSSGEPPKSGDRSGYSSPGSPGTPGSRSRTPSLPTPPTREPKKVAVVRTPPK
SPSSAKSRLQTAPVPMPDLKNVKSKIGSTENLKHQPGGGKVQIINKKLDLSNVQSKCGSKDNIKHVPGGGSVQIVYKPV
DLSKVTSKCGSLGNIHHKPGGGQVEVKSEKLDFKDRVQSKIGSLDNITHVPGGGNKKIETHKLTFRENAKAKTDHGAEIV
YKSPVVSGDTSPRHLSNVSSTGSIDMVDSPQLATLADEVSASLAKQGLPDYSLVKALQMAQQNFVITDASLPDNPIVYA
SRGFLTLTGYSLDQILGRNCRFLQGPETDPRAVDKIRNAITKGVDTSVCLLNYRQDGTTFWNLFFVAGLRDSKGNIVNYV
GVQSKVSEDYAKLLVNEQNIEYKGVRTSNMLRRKPGLQSTVPRARDPPDLDN*
SEQ ID NO: 72. Tau-NcVVD(y50w)
MAEPRQEFEVMEDHAGTYGLGDRKDQGGYTMHQDQEGDTDAGLKESPLQTPTEDGSEEPGSETSDAKSTPTAEDVT
APLVDEGAPGKQAAAQPHTEIPEGTTAEEAGIGDTPSLEDEAAGHVTQARMVSKSKDGTGSDDKKAKGADGKTKIATP
RGAAPPGQKGQANATRIPAKTPPAPKTPPSSGEPPKSGDRSGYSSPGSPGTPGSRSRTPSLPTPPTREPKKVAVVRTPPK
SPSSAKSRLQTAPVPMPDLKNVKSKIGSTENLKHQPGGGKVQIINKKLDLSNVQSKCGSKDNIKHVPGGGSVQIVYKPV
DLSKVTSKCGSLGNIHHKPGGGQVEVKSEKLDFKDRVQSKIGSLDNITHVPGGGNKKIETHKLTFRENAKAKTDHGAEIV
YKSPVVSGDTSPRHLSNVSSTGSIDMVDSPQLATLADEVSASLAKQGLHTLYAPGGYDIMGWLIQIMNRPNPQVELGP
VDTSCALILCDLKQKDTPIVYASEAFLYMTGYSNAEVLGRNCRFLQSPDGMVKPKSTRKYVDSNTINTMRKAIDRNAEV
QVEVVNFKKNGQRFVNFLTMIPVRDETGEYRYSMGFQCETELQSTVPRARDPPDLDN*
SEQ ID NO: 73. Tau-NcVVD(wildtype)
MAEPRQEFEVMEDHAGTYGLGDRKDQGGYTMHQDQEGDTDAGLKESPLQTPTEDGSEEPGSETSDAKSTPTAEDVT
APLVDEGAPGKQAAAQPHTEIPEGTTAEEAGIGDTPSLEDEAAGHVTQARMVSKSKDGTGSDDKKAKGADGKTKIATP
RGAAPPGQKGQANATRIPAKTPPAPKTPPSSGEPPKSGDRSGYSSPGSPGTPGSRSRTPSLPTPPTREPKKVAVVRTPPK
SPSSAKSRLQTAPVPMPDLKNVKSKIGSTENLKHQPGGGKVQIINKKLDLSNVQSKCGSKDNIKHVPGGGSVQIVYKPV
DLSKVTSKCGSLGNIHHKPGGGQVEVKSEKLDFKDRVQSKIGSLDNITHVPGGGNKKIETHKLTFRENAKAKTDHGAEIV
YKSPVVSGDTSPRHLSNVSSTGSIDMVDSPQLATLADEVSASLAKQGLHTLYAPGGYDIMGWLIQIMNRPNPQVELGP
VDTSCALILCDLKQKDTPIVYASEAFLYMTGYSNAEVLGRNCRFLQSPDGMVKPKSTRKYVDSNTINTMRKAIDRNAEV
QVEVVNFKKNGQRFVNFLTMIPVRDETGEYRYSMGFQCETELQSTVPRARDPPDLDN*
SEQ ID NO: 74. VfAU-Tau
MPDYSLVKALQMAQQNFVITDASLPDNPIVYASRGFLTLTGYSLDQILGRNCRFLQGPETDPRAVDKIRNAITKGVDTS
VCLLNYRQDGTTFWNLFFVAGLRDSKGNIVNYVGVQSKVSEDYAKLLVNEQNIEYKGVRTSNMLRRKPGSLMAEPRQ
EFEVMEDHAGTYGLGDRKDQGGYTMHQDQEGDTDAGLKESPLQTPTEDGSEEPGSETSDAKSTPTAEDVTAPLVDE
GAPGKQAAAQPHTEIPEGTTAEEAGIGDTPSLEDEAAGHVTQARMVSKSKDGTGSDDKKAKGADGKTKIATPRGAAP
PGQKGQANATRIPAKTPPAPKTPPSSGEPPKSGDRSGYSSPGSPGTPGSRSRTPSLPTPPTREPKKVAVVRTPPKSPSSA
KSRLQTAPVPMPDLKNVKSKIGSTENLKHQPGGGKVQIINKKLDLSNVQSKCGSKDNIKHVPGGGSVQIVYKPVDLSKV
TSKCGSLGNIHHKPGGGQVEVKSEKLDFKDRVQSKIGSLDNITHVPGGGNKKIETHKLTFRENAKAKTDHGAEIVYKSPV
VSGDTSPRHLSNVSSTGSIDMVDSPQLATLADEVSASLAKQGLSNSAVDGTAGPGSTGSR*
SEQ ID NO: 75. Cry-TDP(F147L)-mCherry
MKMDKKTIVWFRRDLRIEDNPALAAAAHEGSVFPVFIWCPEEEGQFYPGRASRWWMKQSLAHLSQSLKALGSDLTLI
KTHNTISAILDCIRVTGATKVVFNHLYDPVSLVRDHTVKEKLVERGISVQSYNGDLLYEPWEIYCEKGKPFTSFNSYWKKC
LDMSIESVMLPPPWRLMPITAAAEAIWACSIEELGLENEAEKPSNALLTRAWSPGWSNADKLLNEFIEKQLIDYAKNSK
KVVGNSTSLLSPYLHFGEISVRHVFQCARMKQIIWARDKNSEGEESADLFLRGIGLREYSRYICFNFPFTHEQSLLSHLRFF
PWDADVDKFKAWRQGRTGYPLVDAGMRELWATGWMHNRIRVIVSSFAVKFLLLPWKWGMKYFWDTLLDADLEC
DILGWQYISGSIPDGHELDRLDNPALQGAKYDPEGEYIRQWLPELARLPTEWIHHPWDAPLTVLKASGVELGTNYAKPI
VDIDTARELLAKAISRTRGAQIMIGAAARGMSEYIRVTEDENDEPIEIPSEDDGTVLLSTVTAQFPGACGLRYRNPVSQC
MRGVRLVEGILHAPDAGWGNLVYVVNYPKDNKRKMDETDASSAVKVKRAVQKTSDLIVLGLPWKTTEQDLKEYFSTF
GEVLMVQVKKDLKTGHSKGLGFVRFTEYETQVKVMSQRHMIDGRWCDCKLPNSKQSQDEPLRSRKVFVGRCTEDMT
EDELREFFSQYGDVMDVFIPKPFRAFAFVTFADDQIAQSLCGEDLIIKGISVHISNAEPKHNSNRQLERSGRFGGNPGGF
GNQGGFGNSRGGGAGLGNNQGSNMGGGMNFGAFSINPAMMAAAQAALQSSWGMMGMLASQQNQSGPSGN
NQNQGNMQREPNQAFGSGNNSYSGSNSGAAIGWGSASNAGSGSGFNGGFGSSMDSKSSGWGMSRDPPVATMV
SKGEEDNMAIIKEFMRFKVHMEGSVNGHEFEIEGEGEGRPYEGTQTAKLKVTKGGPLPFAWDILSPQFMYGSKAYVKH
PADIPDYLKLSFPEGFKWERVMNFEDGGVVTVTQDSSLQDGEFIYKVKLRGTNFPSDGPVMQKKTMGWEASSERMY
PEDGALKGEIKQRLKLKDGGHYDAEVKTTYKAKKPVQLPGAYNVNIKLDITSHNEDYTIVEQYERAEGRHSTGGMDELY
K*
SEQ ID NO: 76. Cry-TDP(F229L)-mCherry
MKMDKKTIVWFRRDLRIEDNPALAAAAHEGSVFPVFIWCPEEEGQFYPGRASRWWMKQSLAHLSQSLKALGSDLTLI
KTHNTISAILDCIRVTGATKVVFNHLYDPVSLVRDHTVKEKLVERGISVQSYNGDLLYEPWEIYCEKGKPFTSFNSYWKKC
LDMSIESVMLPPPWRLMPITAAAEAIWACSIEELGLENEAEKPSNALLTRAWSPGWSNADKLLNEFIEKQLIDYAKNSK
KVVGNSTSLLSPYLHFGEISVRHVFQCARMKQIIWARDKNSEGEESADLFLRGIGLREYSRYICFNFPFTHEQSLLSHLRFF
PWDADVDKFKAWRQGRTGYPLVDAGMRELWATGWMHNRIRVIVSSFAVKFLLLPWKWGMKYFWDTLLDADLEC
DILGWQYISGSIPDGHELDRLDNPALQGAKYDPEGEYIRQWLPELARLPTEWIHHPWDAPLTVLKASGVELGTNYAKPI
VDIDTARELLAKAISRTRGAQIMIGAAARGMSEYIRVTEDENDEPIEIPSEDDGTVLLSTVTAQFPGACGLRYRNPVSQC
MRGVRLVEGILHAPDAGWGNLVYVVNYPKDNKRKMDETDASSAVKVKRAVQKTSDLIVLGLPWKTTEQDLKEYFSTF
GEVLMVQVKKDLKTGHSKGFGFVRFTEYETQVKVMSQRHMIDGRWCDCKLPNSKQSQDEPLRSRKVFVGRCTEDMT
EDELREFFSQYGDVMDVFIPKPFRALAFVTFADDQIAQSLCGEDLIIKGISVHISNAEPKHNSNRQLERSGRFGGNPGGF
GNQGGFGNSRGGGAGLGNNQGSNMGGGMNFGAFSINPAMMAAAQAALQSSWGMMGMLASQQNQSGPSGN
NQNQGNMQREPNQAFGSGNNSYSGSNSGAAIGWGSASNAGSGSGFNGGFGSSMDSKSSGWGMSRDPPVATMV
SKGEEDNMAIIKEFMRFKVHMEGSVNGHEFEIEGEGEGRPYEGTQTAKLKVTKGGPLPFAWDILSPQFMYGSKAYVKH
PADIPDYLKLSFPEGFKWERVMNFEDGGVVTVTQDSSLQDGEFIYKVKLRGTNFPSDGPVMQKKTMGWEASSERMY
PEDGALKGEIKQRLKLKDGGHYDAEVKTTYKAKKPVQLPGAYNVNIKLDITSHNEDYTIVEQYERAEGRHSTGGMDELY
K*
SEQ ID NO: 77. Cry-TDP(S409,410A)-mCherry
MKMDKKTIVWFRRDLRIEDNPALAAAAHEGSVFPVFIWCPEEEGQFYPGRASRWWMKQSLAHLSQSLKALGSDLTLI
KTHNTISAILDCIRVTGATKVVFNHLYDPVSLVRDHTVKEKLVERGISVQSYNGDLLYEPWEIYCEKGKPFTSFNSYWKKC
LDMSIESVMLPPPWRLMPITAAAEAIWACSIEELGLENEAEKPSNALLTRAWSPGWSNADKLLNEFIEKQLIDYAKNSK
KVVGNSTSLLSPYLHFGEISVRHVFQCARMKQIIWARDKNSEGEESADLFLRGIGLREYSRYICFNFPFTHEQSLLSHLRFF
PWDADVDKFKAWRQGRTGYPLVDAGMRELWATGWMHNRIRVIVSSFAVKFLLLPWKWGMKYFWDTLLDADLEC
DILGWQYISGSIPDGHELDRLDNPALQGAKYDPEGEYIRQWLPELARLPTEWIHHPWDAPLTVLKASGVELGTNYAKPI
VDIDTARELLAKAISRTRGAQIMIGAAAQMSEYIRVTEDENDEPIEIPSEDDGTVLLSTVTAQFPGACGLRYRNPVSQCM
RGVRLVEGILHAPDAGWGNLVYVVNYPKDNKRKMDETDASSAVKVKRAVQKTSDLIVLGLPWKTTEQDLKEYFSTFGE
VLMVQVKKDLKTGHSKGFGFVRFTEYETQVKVMSQRHMIDGRWCDCKLPNSKQSQDEPLRSRKVFVGRCTEDMTED
ELREFFSQYGDVMDVFIPKPFRAFAFVTFADDQIAQSLCGEDLIIKGISVHISNAEPKHNSNRQLERSGRFGGNPGGFGN
QGGFGNSRGGGAGLGNNQGSNMGGGMNFGAFSINPAMMAAAQAALQSSWGMMGMLASQQNQSGPSGNNQ
NQGNMQREPNQAFGSGNNSYSGSNSGAAIGWGSASNAGSGSGFNGGFGSSMDSKAAGWGMWDPPVATMVSK
GEEDNMAIIKEFMRFKVHMEGSVNGHEFEIEGEGEGRPYEGTQTAKLKVTKGGPLPFAWDILSPQFMYGSKAYVKHP
ADIPDYLKLSFPEGFKWERVMNFEDGGVVTVTQDSSLQDGEFIYKVKLRGTNFPSDGPVMQKKTMGWEASSERMYP
EDGALKGEIKQRLKLKDGGHYDAEVKTTYKAKKPVQLPGAYNVNIKLDITSHNEDYTIVEQYERAEGRHSTGGMDELYK*
SEQ ID NO: 78. Cry-TDP(S409,410D)-mCherry
MKMDKKTIVWFRRDLRIEDNPALAAAAHEGSVFPVFIWCPEEEGQFYPGRASRWWMKQSLAHLSQSLKALGSDLTLI
KTHNTISAILDCIRVTGATKVVFNHLYDPVSLVRDHTVKEKLVERGISVQSYNGDLLYEPWEIYCEKGKPFTSFNSYWKKC
LDMSIESVMLPPPWRLMPITAAAEAIWACSIEELGLENEAEKPSNALLTRAWSPGWSNADKLLNEFIEKQLIDYAKNSK
KVVGNSTSLLSPYLHFGEISVRHVFQCARMKQIIWARDKNSEGEESADLFLRGIGLREYSRYICFNFPFTHEQSLLSHLRFF
PWDADVDKFKAWRQGRTGYPLVDAGMRELWATGWMHNRIRVIVSSFAVKFLLLPWKWGMKYFWDTLLDADLEC
DILGWQYISGSIPDGHELDRLDNPALQGAKYDPEGEYIRQWLPELARLPTEWIHHPWDAPLTVLKASGVELGTNYAKPI
VDIDTARELLAKAISRTRGAQIMIGAAAQMSEYIRVTEDENDEPIEIPSEDDGTVLLSTVTAQFPGACGLRYRNPVSQCM
RGVRLVEGILHAPDAGWGNLVYVVNYPKDNKRKMDETDASSAVKVKRAVQKTSDLIVLGLPWKTTEQDLKEYFSTFGE
VLMVQVKKDLKTGHSKGFGFVRFTEYETQVKVMSQRHMIDGRWCDCKLPNSKQSQDEPLRSRKVFVGRCTEDMTED
ELREFFSQYGDVMDVFIPKPFRAFAFVTFADDQIAQSLCGEDLIIKGISVHISNAEPKHNSNRQLERSGRFGGNPGGFGN
QGGFGNSRGGGAGLGNNQGSNMGGGMNFGAFSINPAMMAAAQAALQSSWGMMGMLASQQNQSGPSGNNQ
NQGNMQREPNQAFGSGNNSYSGSNSGAAIGWGSASNAGSGSGFNGGFGSSMDSKDDGWGMWDPPVATMVSK
GEEDNMAIIKEFMRFKVHMEGSVNGHEFEIEGEGEGRPYEGTQTAKLKVTKGGPLPFAWDILSPQFMYGSKAYVKHP
ADIPDYLKLSFPEGFKWERVMNFEDGGVVTVTQDSSLQDGEFIYKVKLRGTNFPSDGPVMQKKTMGWEASSERMYP
EDGALKGEIKQRLKLKDGGHYDAEVKTTYKAKKPVQLPGAYNVNIKLDITSHNEDYTIVEQYERAEGRHSTGGMDELYK*
SEQ ID NO: 79. Cry-TDP(A321V)-mCherry
MKMDKKTIVWFRRDLRIEDNPALAAAAHEGSVFPVFIWCPEEEGQFYPGRASRWWMKQSLAHLSQSLKALGSDLTLI
KTHNTISAILDCIRVTGATKVVFNHLYDPVSLVRDHTVKEKLVERGISVQSYNGDLLYEPWEIYCEKGKPFTSFNSYWKKC
LDMSIESVMLPPPWRLMPITAAAEAIWACSIEELGLENEAEKPSNALLTRAWSPGWSNADKLLNEFIEKQLIDYAKNSK
KVVGNSTSLLSPYLHFGEISVRHVFQCARMKQIIWARDKNSEGEESADLFLRGIGLREYSRYICFNFPFTHEQSLLSHLRFF
PWDADVDKFKAWRQGRTGYPLVDAGMRELWATGWMHNRIRVIVSSFAVKFLLLPWKWGMKYFWDTLLDADLEC
DILGWQYISGSIPDGHELDRLDNPALQGAKYDPEGEYIRQWLPELARLPTEWIHHPWDAPLTVLKASGVELGTNYAKPI
VDIDTARELLAKAISRTRGAQIMIGAAAQMSEYIRVTEDENDEPIEIPSEDDGTVLLSTVTAQFPGACGLRYRNPVSQCM
RGVRLVEGILHAPDAGWGNLVYVVNYPKDNKRKMDETDASSAVKVKRAVQKTSDLIVLGLPWKTTEQDLKEYFSTFGE
VLMVQVKKDLKTGHSKGFGFVRFTEYETQVKVMSQRHMIDGRWCDCKLPNSKQSQDEPLRSRKVFVGRCTEDMTED
ELREFFSQYGDVMDVFIPKPFRAFAFVTFADDQ1AQSLCGEDLIIKGISVHISNAEPKHNSNRQLERSGRFGGNPGGFGN
QGGFGNSRGGGAGLGNNQGSNMGGGMNFGAFSINPVMMAAAQAALQSSWGMMGMLASQQNQSGPSGNNQ
NQGNMQREPNQAFGSGNNSYSGSNSGAAIGWGSASNAGSGSGFNGGFGSSMDSKSSGWGWDPPVATMVSKGEE
DNMAIIKEFMRFKVHMEGSVNGHEFEIEGEGEGRPYEGTQTAKLKVTKGGPLPFAWDILSPQFMYGSKAYVKHPADIP
DYLKLSFPEGFKWERVMNFEDGGVVTVTQDSSLQDGEFIYKVKLRGTNFPSDGPVMQKKTMGWEASSERMYPEDGA
LKGEIKQRLKLKDGGHYDAEVKTTYKAKKPVQLPGAYNVNIKLDITSHNEDYTIVEQYERAEGRHSTGGMDELYK*
SEQ ID NO: 80. Cry-TDP(m337V)-mCherry
MKMDKKTIVWFRRDLRIEDNPALAAAAHEGSVFPVFIWCPEEEGQFYPGRASRWWMKQSLAHLSQSLKALGSDLTLI
KTHNTISAILDCIRVTGATKVVFNHLYDPVSLVRDHTVKEKLVERGISVQSYNGDLLYEPWEIYCEKGKPFTSFNSYWKKC
LDMSIESVMLPPPWRLMPITAAAEAIWACSIEELGLENEAEKPSNALLTRAWSPGWSNADKLLNEFIEKQLIDYAKNSK
KVVGNSTSLLSPYLHFGEISVRHVFQCARMKQIIWARDKNSEGEESADLFLRGIGLREYSRYICFNFPFTHEQSLLSHLRFF
PWDADVDKFKAWRQGRTGYPLVDAGMRELWATGWMHNRIRVIVSSFAVKFLLLPWKWGMKYFWDTLLDADLEC
DILGWQYISGSIPDGHELDRLDNPALQGAKYDPEGEYIRQWLPELARLPTEWIHHPWDAPLTVLKASGVELGTNYAKPI
VDIDTARELLAKAISRTRGAQIMIGAAAQMSEYIRVTEDENDEPIEIPSEDDGTVLLSTVTAQFPGACGLRYRNPVSQCM
RGVRLVEGILHAPDAGWGNLVYVVNYPKDNKRKMDETDASSAVKVKRAVQKTSDLIVLGLPWKTTEQDLKEYFSTFGE
VLMVQVKKDLKTGHSKGFGFVRFTEYETQVKVMSQRHMIDGRWCDCKLPNSKQSQDEPLRSRKVFVGRCTEDMTED
ELREFFSQYGDVMDVFIPKPFRAFAFVTFADDQIAQSLCGEDLIIKGISVHISNAEPKHNSNRQLERSGRFGGNPGGFGN
QGGFGNSRGGGAGLGNNQGSNMGGGMNFGAFSINPAMMAAAQAALQSSWGMVGMLASQQNQSGPSGNNQN
QGNMQREPNQAFGSGNNSYSGSNSGAAIGWGSASNAGSGSGFNGGFGSSMDSKSSGWGWDPPVATMVSKGEED
NMAIIKEFMRFKVHMEGSVNGHEFEIEGEGEGRPYEGTQTAKLKVTKGGPLPFAWDILSPQFMYGSKAYVKHPADIPD
YLKLSFPEGFKWERVMNFEDGGVVTVTQDSSLQDGEFIYKVKLRGTNFPSDGPVMQKKTMGWEASSERMYPEDGAL
KGElKQRLKLKDGGHYDAEVKTTYKAKKPVQLPGAYNVNIKLDITSHNEDYTIVEQYERAEGRHSTGGMDELYK*
SEQ ID NO: 81. Cry-TDP(LCD, A321V)-mCherry
MKMDKKTIVWFRRDLRIEDNPALAAAAHEGSVFPVFIWCPEEEGQFYPGRASRWWMKQSLAHLSQSLKALGSDLTLI
KTHNTISAILDCIRVTGATKVVFNHLYDPVSLVRDHTVKEKLVERGISVQSYNGDLLYEPWEIYCEKGKPFTSFNSYWKKC
LDMSIESVMLPPPWRLMPITAAAEAIWACSIEELGLENEAEKPSNALLTRAWSPGWSNADKLLNEFIEKQLIDYAKNSK
KVVGNSTSLLSPYLHFGEISVRHVFQCARMKQIIWARDKNSEGEESADLFLRGIGLREYSRYICFNFPFTHEQSLLSHLRFF
PWDADVDKFKAWRQGRTGYPLVDAGMRELWATGWMHNRIRVIVSSFAVKFLLLPWKWGMKYFWDTLLDADLEC
DILGWQYISGSIPDGHELDRLDNPALQGAKYDPEGEYIRQWLPELARLPTEWIHHPWDAPLTVLKASGVELGTNYAKPI
VDIDTARELLAKAISRTRGAQIMIGAAAQGRFGGNPGGFGNQGGFGNSRGGGAGLGNNQGSNMGGGMNFGAFSI
NPVMMAAAQAALQSSWGMMGMLASQQNQSGPSGNNQNQGNMQREPNQAFGSGNNSYSGSNSGAAIGWGSA
SNAGSGSGFNGGFGSSMDSKSSGWGMRDPPVATMVSKGEEDNMAIIKEFMRFKVHMEGSVNGHEFEIEGEGEGRP
YEGTQTAKLKVTKGGPLPFAWDILSPQFMYGSKAYVKHPADIPDYLKLSFPEGFKWERVMNFEDGGVVTVTQDSSLQD
GEFIYKVKLRGTNFPSDGPVMQKKTMGWEASSERMYPEDGALKGEIKQRLKLKDGGHYDAEVKTTYKAKKPVQLPGA
YNVNIKLDITSHNEDYTIVEQYERAEGRHSTGGMDELYK*
SEQ ID NO: 82. Cry-TDP(LCD, M337V)-mCherry
MKMDKKTIVWFRRDLRIEDNPALAAAAHEGSVFPVFIWCPEEEGQFYPGRASRWWMKQSLAHLSQSLKALGSDLTLI
KTHNTISAILDCIRVTGATKVVFNHLYDPVSLVRDHTVKEKLVERGISVQSYNGDLLYEPWEIYCEKGKPFTSFNSYWKKC
LDMSIESVMLPPPWRLMPITAAAEAIWACSIEELGLENEAEKPSNALLTRAWSPGWSNADKLLNEFIEKQLIDYAKNSK
KVVGNSTSLLSPYLHFGEISVRHVFQCARMKQIIWARDKNSEGEESADLFLRGIGLREYSRYICFNFPFTHEQSLLSHLRFF
PWDADVDKFKAWRQGRTGYPLVDAGMRELWATGWMHNRIRVIVSSFAVKFLLLPWKWGMKYFWDTLLDADLEC
DILGWQYISGSIPDGHELDRLDNPALQGAKYDPEGEYIRQWLPELARLPTEWIHHPWDAPLTVLKASGVELGTNYAKPI
VDIDTARELLAKAISRTRGAQIMIGAAAQGRFGGNPGGFGNQGGFGNSRGGGAGLGNNQGSNMGGGMNFGAFSI
NPAMMAAAQAALQSSWGMVGMLASQQNQSGPSGNNQNQGNMQREPNQAFGSGNNSYSGSNSGAAIGWGSA
SNAGSGSGFNGGFGSSMDSKSSGWGMRDPPVATMVSKGEEDNMAIIKEFMRFKVHMEGSVNGHEFEIEGEGEGRP
YEGTQTAKLKVTKGGPLPFAWDILSPQFMYGSKAYVKHPADIPDYLKLSFPEGFKWERVMNFEDGGVVTVTQDSSLQD
GEFIYKVKLRGTNFPSDGPVMQKKTMGWEASSERMYPEDGALKGEIKQRLKLKDGGHYDAEVKTTYKAKKPVQLPGA
YNVNIKLDITSHNEDYTIVEQYERAEGRHSTGGMDELYK*
SEQ ID NO: 83. Cry-TDP(LCD, S409, 410A)-mCherry
MKMDKKTIVWFRRDLRIEDNPALAAAAHEGSVFPVFIWCPEEEGQFYPGRASRWWMKQSLAHLSQSLKALGSDLTLI
KTHNTISAILDCIRVTGATKVVFNHLYDPVSLVRDHTVKEKLVERGISVQSYNGDLLYEPWEIYCEKGKPFTSFNSYWKKC
LDMSIESVMLPPPWRLMPITAAAEAIWACSIEELGLENEAEKPSNALLTRAWSPGWSNADKLLNEFIEKQLIDYAKNSK
KVVGNSTSLLSPYLHFGEISVRHVFQCARMKQIIWARDKNSEGEESADLFLRGIGLREYSRYICFNFPFTHEQSLLSHLRFF
PWDADVDKFKAWRQGRTGYPLVDAGMRELWATGWMHNRIRVIVSSFAVKFLLLPWKWGMKYFWDTLLDADLEC
DILGWQYISGSIPDGHELDRLDNPALQGAKYDPEGEYIRQWLPELARLPTEWIHHPWDAPLTVLKASGVELGTNYAKPI
VDIDTARELLAKAISRTRGAQIMIGAAAQGRFGGNPGGFGNQGGFGNSRGGGAGLGNNQGSNMGGGMNFGAFSI
NPAMMAAAQAALQSSWGMMGMLASQQNQSGPSGNNQNQGNMQREPNQAFGSGNNSYSGSNSGAAIGWGSA
SNAGSGSGFNGGFGSSMDSKAAGWGMRDPPVATMVSKGEEDNMAIIKEFMRFKVHMEGSVNGHEFEIEGEGEGR
PYEGTQTAKLKVTKGGPLPFAWDILSPQFMYGSKAYVKHPADIPDYLKLSFPEGFKWERVMNFEDGGVVTVTQDSSLQ
DGEFIYKVKLRGTNFPSDGPVMQKKTMGWEASSERMYPEDGALKGEIKQRLKLKDGGHYDAEVKTTYKAKKPVQLPG
AYNVNIKLDITSHNEDYTIVEQYERAEGRHSTGGMDELYK*
SEQ ID NO: 84. Cry-TDP(LCD, S409, 410D)-mCherry
MKMDKKTIVWFRRDLRIEDNPALAAAAHEGSVFPVFIWCPEEEGQFYPGRASRWWMKQSLAHLSQSLKALGSDLTLI
KTHNTISAILDCIRVTGATKVVFNHLYDPVSLVRDHTVKEKLVERGISVQSYNGDLLYEPWEIYCEKGKPFTSFNSYWKKC
LDMSIESVMLPPPWRLMPITAAAEAIWACSIEELGLENEAEKPSNALLTRAWSPGWSNADKLLNEFIEKQLIDYAKNSK
KVVGNSTSLLSPYLHFGEISVRHVFQCARMKQIIWARDKNSEGEESADLFLRGIGLREYSRYICFNFPFTHEQSLLSHLRFF
PWDADVDKFKAWRQGRTGYPLVDAGMRELWATGWMHNRIRVIVSSFAVKFLLLPWKWGMKYFWDTLLDADLEC
DILGWQYISGSIPDGHELDRLDNPALQGAKYDPEGEYIRQWLPELARLPTEWIHHPWDAPLTVLKASGVELGTNYAKPI
VDIDTARELLAKAISRTRGAQIMIGAAAPGRFGGNPGGFGNQGGFGNSRGGGAGLGNNQGSNMGGGMNFGAFSIN
PAMMAAAQAALQSSWGMMGMLASQQNQSGPSGNNQNQGNMQREPNQAFGSGNNSYSGSNSGAAIGWGSAS
NAGSGSGFNGGFGSSMDSKDDGWGMTRDPPVATMVSKGEEDNMAIIKEFMRFKVHMEGSVNGHEFEIEGEGEGR
PYEGTQTAKLKVTKGGPLPFAWDILSPQFMYGSKAYVKHPADIPDYLKLSFPEGFKWERVMNFEDGGVVTVTQDSSLQ
DGEFIYKVKLRGTNFPSDGPVMQKKTMGWEASSERMYPEDGALKGEIKQRLKLKDGGHYDAEVKTTYKAKKPVQLPG
AYNVNIKLDITSHNEDYTIVEQYERAEGRHSTGGMDELYK*
SEQ ID NO: 85. Cry-TDP(5FL)-mcherry
MKMDKKTIVWFRRDLRIEDNPALAAAAHEGSVFPVFIWCPEEEGQFYPGRASRWWMKQSLAHLSQSLKALGSDLTLI
KTHNTISAILDCIRVTGATKVVFNHLYDPVSLVRDHTVKEKLVERGISVQSYNGDLLYEPWEIYCEKGKPFTSFNSYWKKC
LDMSIESVMLPPPWRLMPITAAAEAIWACSIEELGLENEAEKPSNALLTRAWSPGWSNADKLLNEFIEKQLIDYAKNSK
KVVGNSTSLLSPYLHFGEISVRHVFQCARMKQIIWARDKNSEGEESADLFLRGIGLREYSRYICFNFPFTHEQSLLSHLRFF
PWDADVDKFKAWRQGRTGYPLVDAGMRELWATGWMHNRIRVIVSSFAVKFLLLPWKWGMKYFWDTLLDADLEC
DILGWQYISGSIPDGHELDRLDNPALQGAKYDPEGEYIRQWLPELARLPTEWIHHPWDAPLTVLKASGVELGTNYAKPI
VDIDTARELLAKAISRTRGAQIMIGAAAQMSEYIRVTEDENDEPIEIPSEDDGTVLLSTVTAQFPGACGLRYRNPVSQCM
RGVRLVEGILHAPDAGWGNLVYVVNYPKDNKRKMDETDASSAVKVKRAVQKTSDLIVLGLPWKTTEQDLKEYFSTFGE
VLMVQVKKDLKTGHSKGLGLVRFTEYETQVKVMSQRHMIDGRWCDCKLPNSKQSQDEPLRSRKVLVGRCTEDMTED
ELREFFSQYGDVMDVFIPKPFRALALVTFADDQ1AQSLCGEDLIIKGISVHISNAEPKHNSNRQLERSGRFGGNPGGFGN
QGGFGNSRGGGAGLGNNQGSNMGGGMNFGAFSINPAMMAAAQAALQSSWGMMGMLASQQNQSGPSGNNQ
NQGNMQREPNQAFGSGNNSYSGSNSGAAIGWGSASNAGSGSGFNGGFGSSMDSKSSGWGMWDPPVATMVSKG
EEDNMAIIKEFMRFKVHMEGSVNGHEFEIEGEGEGRPYEGTQTAKLKVTKGGPLPFAWDILSPQFMYGSKAYVKHPA
DIPDYLKLSFPEGFKWERVMNFEDGGVVTVTQDSSLQDGEFIYKVKLRGTNFPSDGPVMQKKTMGWEASSERMYPE
DGALKGEIKQRLKLKDGGHYDAEVKTTYKAKKPVQLPGAYNVNIKLDITSHNEDYTIVEQYERAEGRHSTGGMDELYK*
SEQ ID NO: 86. Cry-TDP(RRM1)-mCherry
MKMDKKTIVWFRRDLRIEDNPALAAAAHEGSVFPVFIWCPEEEGQFYPGRASRWWMKQSLAHLSQSLKALGSDLTLI
KTHNTISAILDCIRVTGATKVVFNHLYDPVSLVRDHTVKEKLVERGISVQSYNGDLLYEPWEIYCEKGKPFTSFNSYWKKC
LDMSIESVMLPPPWRLMPITAAAEAIWACSIEELGLENEAEKPSNALLTRAWSPGWSNADKLLNEFIEKQLIDYAKNSK
KVVGNSTSLLSPYLHFGEISVRHVFQCARMKQIIWARDKNSEGEESADLFLRGIGLREYSRYICFNFPFTHEQSLLSHLRFF
PWDADVDKFKAWRQGRTGYPLVDAGMRELWATGWMHNRIRVIVSSFAVKFLLLPWKWGMKYFWDTLLDADLEC
DILGWQYISGSIPDGHELDRLDNPALQGAKYDPEGEYIRQWLPELARLPTEWIHHPWDAPLTVLKASGVELGTNYAKPI
VDIDTARELLAKAISRTRGAQIMIGAAAQDLIVLGLPWKTTEQDLKEYFSTFGEVLMVQVKKDLKTGHSKGFGFVRFTEY
ETQVKVMSQRHMIDGRWCDCKLPNSKQSQDEPLRSRDPPVATMVSKGEEDNMAIIKEFMRFKVHMEGSVNGHEFEI
EGEGEGRPYEGTQTAKLKVTKGGPLPFAWDILSPQFMYGSKAYVKHPADIPDYLKLSFPEGFKWERVMNFEDGGVVTV
TQDSSLQDGEFIYKVKLRGTNFPSDGPVMQKKTMGWEASSERMYPEDGALKGEIKQRLKLKDGGHYDAEVKTTYKAK
KPVQLPGAYNVNIKLDITSHNEDYTIVEQYERAEGRHSTGGMDELYK*
SEQ ID NO: 87. Cry-TDP(RRM2)-mCherry
MKMDKKTIVWFRRDLRIEDNPALAAAAHEGSVFPVFIWCPEEEGQFYPGRASRWWMKQSLAHLSQSLKALGSDLTLI
KTHNTISAILDCIRVTGATKVVFNHLYDPVSLVRDHTVKEKLVERGISVQSYNGDLLYEPWEIYCEKGKPFTSFNSYWKKC
LDMSIESVMLPPPWRLMPITAAAEAIWACSIEELGLENEAEKPSNALLTRAWSPGWSNADKLLNEFIEKQLIDYAKNSK
KVVGNSTSLLSPYLHFGEISVRHVFQCARMKQIIWARDKNSEGEESADLFLRGIGLREYSRYICFNFPFTHEQSLLSHLRFF
PWDADVDKFKAWRQGRTGYPLVDAGMRELWATGWMHNRIRVIVSSFAVKFLLLPWKWGMKYFWDTLLDADLEC
DILGWQYISGSIPDGHELDRLDNPALQGAKYDPEGEYIRQWLPELARLPTEWIHHPWDAPLTVLKASGVELGTNYAKPI
VDIDTARELLAKAISRTRGAQIMIGAAAQRKVFVGRCTEDMTEDELREFFSQYGDVMDVFIPKPFRAFAFVTFADDQIA
QSLCGEDLIIKGISVHISNAEPRDPPVATMVSKGEEDNMAIIKEFMRFKVHMEGSVNGHEFEIEGEGEGRPYEGTQTAK
LKVTKGGPLPFAWDILSPQFMYGSKAYVKHPADIPDYLKLSFPEGFKWERVMNFEDGGVVTVTQDSSLQDGEFIYKVKL
RGTNFPSDGPVMQKKTMGWEASSERMYPEDGALKGEIKQRLKLKDGGHYDAEVKTTYKAKKPVQLPGAYNVNIKLDI
TSHNEDYTIVEQYERAEGRHSTGGMDELYK*
SEQ ID NO: 88. Cry-TDP(RRM1 + 2)-mCherry
MKMDKKTIVWFRRDLRIEDNPALAAAAHEGSVFPVFIWCPEEEGQFYPGRASRWWMKQSLAHLSQSLKALGSDLTLI
KTHNTISAILDCIRVTGATKVVFNHLYDPVSLVRDHTVKEKLVERGISVQSYNGDLLYEPWEIYCEKGKPFTSFNSYWKKC
LDMSIESVMLPPPWRLMPITAAAEAIWACSIEELGLENEAEKPSNALLTRAWSPGWSNADKLLNEFIEKQLIDYAKNSK
KVVGNSTSLLSPYLHFGEISVRHVFQCARMKQIIWARDKNSEGEESADLFLRGIGLREYSRYICFNFPFTHEQSLLSHLRFF
PWDADVDKFKAWRQGRTGYPLVDAGMRELWATGWMHNRIRVIVSSFAVKFLLLPWKWGMKYFWDTLLDADLEC
DILGWQYISGSIPDGHELDRLDNPALQGAKYDPEGEYIRQWLPELARLPTEWIHHPWDAPLTVLKASGVELGTNYAKPI
VDIDTARELLAKAISRTRGAQIMIGAAAQDLIVLGLPWKTTEQDLKEYFSTFGEVLMVQVKKDLKTGHSKGFGFVRFTEY
ETQVKVMSQRHMIDGRWCDCKLPNSKQSQDEPLRSRKVFVGRCTEDMTEDELREFFSQYGDVMDVFIPKPFRAFAFV
TFADDQIAQSLCGEDLIIKGISVHISNAEPRDPPVATMVSKGEEDNMAIIKEFMRFKVHMEGSVNGHEFEIEGEGEGRP
YEGTQTAKLKVTKGGPLPFAWDILSPQFMYGSKAYVKHPADIPDYLKLSFPEGFKWERVMNFEDGGVVTVTQDSSLQD
GEFIYKVKLRGTNFPSDGPVMQKKTMGWEASSERMYPEDGALKGEIKQRLKLKDGGHYDAEVKTTYKAKKPVQLPGA
YNVNIKLDITSHNEDYTIVEQYERAEGRHSTGGMDELYK*
SEQ ID NO: 89. Cry-TDP(dLCD)-mCherry
MKMDKKTIVWFRRDLRIEDNPALAAAAHEGSVFPVFIWCPEEEGQFYPGRASRWWMKQSLAHLSQSLKALGSDLTLI
KTHNTISAILDCIRVTGATKVVFNHLYDPVSLVRDHTVKEKLVERGISVQSYNGDLLYEPWEIYCEKGKPFTSFNSYWKKC
LDMSIESVMLPPPWRLMPITAAAEAIWACSIEELGLENEAEKPSNALLTRAWSPGWSNADKLLNEFIEKQLIDYAKNSK
KVVGNSTSLLSPYLHFGEISVRHVFQCARMKQIIWARDKNSEGEESADLFLRGIGLREYSRYICFNFPFTHEQSLLSHLRFF
PWDADVDKFKAWRQGRTGYPLVDAGMRELWATGWMHNRIRVIVSSFAVKFLLLPWKWGMKYFWDTLLDADLEC
DILGWQYISGSIPDGHELDRLDNPALQGAKYDPEGEYIRQWLPELARLPTEWIHHPWDAPLTVLKASGVELGTNYAKPI
VDIDTARELLAKAISRTRGAQIMIGAAAQMSEYIRVTEDENDEPIEIPSEDDGTVLLSTVTAQFPGACGLRYRNPVSQCM
RGVRLVEGILHAPDAGWGNLVYVVNYPKDNKRKMDETDASSAVKVKRAVQKTSDLIVLGLPWKTTEQDLKEYFSTFGE
VLMVQVKKDLKTGHSKGFGFVRFTEYETQVKVMSQRHMIDGRWCDCKLPNSKQSQDEPLRSRKVFVGRCTEDMTED
ELREFFSQYGDVMDVFIPKPFRAFAFVTFADDQIAQSLCGEDLIIKGISVHISNAEPKHNSNRQLERSRDPPVATMVSKG
EEDNMAIIKEFMRFKVHMEGSVNGHEFEIEGEGEGRPYEGTQTAKLKVTKGGPLPFAWDILSPQFMYGSKAYVKHPA
DIPDYLKLSFPEGFKWERVMNFEDGGVVTVTQDSSLQDGEFIYKVKLRGTNFPSDGPVMQKKTMGWEASSERMYPE
DGALKGEIKQRLKLKDGGHYDAEVKTTYKAKKPVQLPGAYNVNIKLDITSHNEDYTIVEQYERAEGRHSTGGMDELYK*
FUS Protein Arrangements Generated:
1. Cry2olig Fusion Proteins Amino Acid Sequences:
A) Full Length FUS Protein No Reporter
SEQ ID NO: 90. Cry2Olig-FUS
MKMDKKTIVWFRRDLRIEDNPALAAAAHEGSVFPVFIWCPEEEGQFYPGRASRWWMKQSLAHLSQSLKALGSDLTLI
KTHNTISAILDCIRVTGATKVVFNHLYDPVSLVRDHTVKEKLVERGISVQSYNGDLLYEPWEIYCEKGKPFTSFNSYWKKC
LDMSIESVMLPPPWRLMPITAAAEAIWACSIEELGLENEAEKPSNALLTRAWSPGWSNADKLLNEFIEKQLIDYAKNSK
KVVGNSTSLLSPYLHFGEISVRHVFQCARMKQIIWARDKNSEGEESADLFLRGIGLREYSRYICFNFPFTHEQSLLSHLRFF
PWDADVDKFKAWRQGRTGYPLVDAGMRELWATGWMHNRIRVIVSSFAVKFLLLPWKWGMKYFWDTLLDADLEC
DILGWQYISGSIPDGHELDRLDNPALQGAKYDPEGEYIRQWLPELARLPTEWIHHPWDAPLTVLKASGVELGTNYAKPI
VDIDTARELLAKAISRTRGAQIMIGAAAQCRATMYPYDVPDYAMASNDYTQQATQSYGAYPTQPGQGYSQQSSQPY
GQQSYSGYSQSTDTSGYGQSSYSSYGQSQNTGYGTQSTPQGYGSTGGYGSSQSSQSSYGQQSSYPGYGQQPAPSSTS
GSYGSSSQSSSYGQPQSGSYSQQPSYGGQQQSYGQQQSYNPPQGYGQQNQYNSSSGGGGGGGGGGNYGQDQSS
MSSGGGSGGGYGNQDQSGGGGSGGYGQQDRGGRGRGGSGGGGGGGGGGYNRSSGGYEPRGRGGGRGGRGGM
GGSDRGGFNKFGGPRDQGSRHDSEQDNSDNNTIFVQGLGENVTIESVADYFKQIGIIKTNKKTGQPMINLYTDRETGK
LKGEATVSFDDPPSAKAAIDWFDGKEFSGNPIKVSFATRRADFNRGGGNGRGGRGRGGPMGRGGYGGGGSGGGGR
GGFPSGGGGGGGQQRAGDWKCPNPTCENMNFSWRNECNQCKAPKPDGPGGGPGGSHMGGNYGDDRRGGRGG
YDRGGYRGRGGDRGGFRGGRGGGDRGGFGPGKMDSRGEHRQDRRERPY
B) Full Length FUS Protein + mCherry Reporter
SEQ ID NO: 91. Cry2Olig-FUS-mCherry
MKMDKKTIVWFRRDLRIEDNPALAAAAHEGSVFPVFIWCPEEEGQFYPGRASRWWMKQSLAHLSQSLKALGSDLTLI
KTHNTISAILDCIRVTGATKVVFNHLYDPVSLVRDHTVKEKLVERGISVQSYNGDLLYEPWEIYCEKGKPFTSFNSYWKKC
LDMSIESVMLPPPWRLMPITAAAEAIWACSIEELGLENEAEKPSNALLTRAWSPGWSNADKLLNEFIEKQLIDYAKNSK
KVVGNSTSLLSPYLHFGEISVRHVFQCARMKQIIWARDKNSEGEESADLFLRGIGLREYSRYICFNFPFTHEQSLLSHLRFF
PWDADVDKFKAWRQGRTGYPLVDAGMRELWATGWMHNRIRVIVSSFAVKFLLLPWKWGMKYFWDTLLDADLEC
DILGWQYISGSIPDGHELDRLDNPALQGAKYDPEGEYIRQWLPELARLPTEWIHHPWDAPLTVLKASGVELGTNYAKPI
VDIDTARELLAKAISRTRGAQIMIGAAAQCRATMYPYDVPDYAMASNDYTQQATQSYGAYPTQPGQGYSQQSSQPY
GQQSYSGYSQSTDTSGYGQSSYSSYGQSQNTGYGTQSTPQGYGSTGGYGSSQSSQSSYGQQSSYPGYGQQPAPSSTS
GSYGSSSQSSSYGQPQSGSYSQQPSYGGQQQSYGQQQSYNPPQGYGQQNQYNSSSGGGGGGGGGGNYGQDQSS
MSSGGGSGGGYGNQDQSGGGGSGGYGQQDRGGRGRGGSGGGGGGGGGGYNRSSGGYEPRGRGGGRGGRGGM
GGSDRGGFNKFGGPRDQGSRHDSEQDNSDNNTIFVQGLGENVTIESVADYFKQIGIIKTNKKTGQPMINLYTDRETGK
LKGEATVSFDDPPSAKAAIDWFDGKEFSGNPIKVSFATRRADFNRGGGNGRGGRGRGGPMGRGGYGGGGSGGGGR
GGFPSGGGGGGGQQRAGDWKCPNPTCENMNFSWRNECNQCKAPKPDGPGGGPGGSHMGGNYGDDRRGGRGG
YDRGGYRGRGGDRGGFRGGRGGGDRGGFGPGKMDSRGEHRQDRRERPYWDPPVATMVSKGEEDNMAIIKEFMR
FKVHMEGSVNGHEFEIEGEGEGRPYEGTQTAKLKVTKGGPLPFAWDILSPQFMYGSKAYVKHPADIPDYLKLSFPEGFK
WERVMNFEDGGVVTVTQDSSLQDGEFIYKVKLRGTNFPSDGPVMQKKTMGWEASSERMYPEDGALKGEIKQRLKLK
DGGHYDAEVKTTYKAKKPVQLPGAYNVNIKLDITSHNEDYTIVEQYERAEGRHSTGGMDELYK
Amino Acid Sequences of the Vaucheria frigida (Yellow-green alga)
(Conferva frigida) Aureochrome1 protein (Gene is AUREO1):
SEQ ID NO: 92. VfAU1 (A8QW55):
MNGLTPPLMFCSRSDDPSSTSNINLDDVFADVFFNSNGELLDIDEIDDFGDNTCPKSSMSVDDDASSQVFQGHLFGNA
LSSIALSDSGDLSTGIYESQGNASRGKSLRTKSSGSISSELTEAQKVERRERNREHAKRSRVRKKFLLESLQQSVNELNHEN
NCLKESIREHLGPRGDSLIAQCSPEADTLLTDNPSKANRILEDPDYSLVKALQMAQQNFVITDASLPDNPIVYASRGFLTL
TGYSLDQILGRNCRFLQGPETDPRAVDKIRNAITKGVDTSVCLLNYRQDGTTFWNLFFVAGLRDSKGNIVNYVGVQSKV
SEDYAKLLVNEQNIEYKGVRTSNMLRRK
SEQ ID NO: 93. VfAU1-LOV domain:
PDYSLVKALQMAQQNFVITDASLPDNPIVYASRGFLTLTGYSLDQILGRNCRFLQGPETDPRAVDKIRNAITKGVDTSVC
LLNYRQDGTTFWNLFFVAGLRDSKGNIVNYVGVQSKVSEDYAKLLVNEQNIEYKGVRTSNMLRRK
SEQ ID NO: 94. VfAU1-DNA sequence-VfAU1-LOV domain (No Start codon):
Cctgactacagtctcgtgaaggctctgcaaatggcacaacagaattttgtcattacagacgcctccctcccagacaaccctatcg
tctacgccagtagagggtttctgacactgacaggctattctctcgaccagatcctgggcaggaactgcaggtttctgcaagggcc
agaaacagacccaagagctgtggataagatcaggaatgccatcaccaaaggcgttgataccagtgtctgtctgctgaattataga
caggatggcacaaccttctggaatctcttcttcgtggctggactcagagattctaagggcaatattgtcaactacgtcggagtgc
agtcaaaggtgagcgaagattatgccaagctgctggtcaacgagcagaacattgagtacaaaggtgtgcgcaccagtaacatgct
gcgcagaaag
SEQ ID NO: 95. TDP-43 (TAR DNA-binding protein-43)
MSEYIRVTEDENDEPIEIPSEDDGTVLLSTVTAQFPGACGLRYRNPVSQCMRGVRLVEGILHAPDAGWGNLVYVVNYP
KDNKRKMDETDASSAVKVKRAVQKTSDLIVLGLPWKTTEQDLKEYFSTFGEVLMVQVKKDLKTGHSKGFGFVRFTEYE
TQVKVMSQRHMIDGRWCDCKLPNSKQSQDEPLRSRKVFVGRCTEDMTEDELREFFSQYGDVMDVFIPKPFRAFAFVT
FADDQIAQSLCGEDLIIKGISVHISNAEPKHNSNRQLERSGRFGGNPGGFGNQGGFGNSRGGGAGLGNNQGSNMGG
GMNFGAFSINPAMMAAAQAALQSSWGMMGMLASQQNQSGPSGNNQNQGNMQREPNQAFGSGNNSYSGSNS
GAAIGWGSASNAGSGSGFNGGFGSSMDSKSSGWGM
SEQ ID NO: 96. TDP-43 (amino acids 105-414)
MDLIVLGLPWKTTEQDLKEYFSTFGEVLMVQVKKDLKTGHSKGFGFVRFTEYETQVKVMSQRHMIDGRWCDCKLPNS
KQSQDEPLRSRKVFVGRCTEDMTEDELREFFSQYGDVMDVFIPKPFRAFAFVTFADDQIAQSLCGEDLIIKGISVHISNAE
PKHNSNRQLERSGRFGGNPGGFGNQGGFGNSRGGGAGLGNNQGSNMGGGMNFGAFSINPAMMAAAQAALQSS
WGMMGMLASQQNQSGPSGNNQNQGNMQREPNQAFGSGNNSYSGSNSGAAIGWGSASNAGSGSGFNGGFGSS
MDSKSSGWGM
SEQ ID NO: 97. TDP-43 (amino acids 191-414)
MRKVFVGRCTEDMTEDELREFFSQYGDVMDVFIPKPFRAFAFVTFADDQIAQSLCGEDLIIKGISVHISNAEPKHNSNR
QLERSGRFGGNPGGFGNQGGFGNSRGGGAGLGNNQGSNMGGGMNFGAFSINPAMMAAAQAALQSSWGMMG
MLASQQNQSGPSGNNQNQGNMQREPNQAFGSGNNSYSGSNSGAAIGWGSASNAGSGSGFNGGFGSSMDSKSSG
WGM
SEQ ID NO: 98. TDP-43 (amino acids 274 to 414)
MGRFGGNPGGFGNQGGFGNSRGGGAGLGNNQGSNMGGGMNFGAFSINPAMMAAAQAALQSSWGMMGMLA
SQQNQSGPSGNNQNQGNMQREPNQAFGSGNNSYSGSNSGAAIGWGSASNAGSGSGFNGGFGSSMDSKSSGWG
M
SEQ ID NO: 99. AsLOV2
GEFLATTLERIEKNFVITDP RLPDNPIIFASDSFLQLTEY SREEILGRNCRFLQGPETDR ATVRKIRDAIDNQTEVTVQL
INYTKSGKKFWNLFHLQPMR DQKGDVQYFIGVQLDGTEHV RDAAEREGVMLIKKTAENID
EAAKELPDANLRPEDLWANH G
SEQ ID NO: 100. EL222
MLDMGQDRPI DGSGAPGADD TRVEVQPPAQ WVLDLIEASP IASVVSDPRL ADNPLIAINQ AFTDLTGYSE
EECVGRNCRF LAGSGTEPWL TDKIRQGVRE HKPVLVEILN YKKDGTPFRN AVLVAPIYDD DDELLYFLGS
QVEVDDDQPN MGMARRERAA EMLKTLSPRQ LEVTTLVASG LRNKEVAARL GLSEKTVKMH RGLVMEKLNL
KTSADLVRIA VEAGI
SEQ ID NO: 101. Ytva
MASFQSFGIP GQLEVIKKAL DHVRVGVVIT DPALEDNPIV YVNQGFVQMT GYETEEILGK NCRFLQGKHT
DPAEVDNIRT ALQNKEPVTV QIQNYKKDGT MFWNELNIDP MEIEDKTYFV GIQNDITKQK
EYEKLLEDSL TEITALSTPI VPIRNGISAL PLVGNLTEER FNSIVCTLTN ILSTSKDDYL IIDLSGLAQV
NEQTADQIFK LSHLLKLTGT ELIITGIKPE LAMKMNKLDA NFSSLKTYSN VKDAVKVLPI M
SEQ ID NO: 102. RsLOV
MDQKQFEKIRAVFDRSGVALTLVDMSLPEQPVVLANPPFLRMTGYTEGQILGFNCRFLQRGDENAQARAD
IRDALKLGRELQVVLRNYRANDEPFDNLLFLHPVGGRPDAPDYFLGSQFELGRSGNSEEAAAAGHAGALT
GELARIGTVAARLEMDSRRHLAQAAAALVRAWERRG

[0135] Unless defined otherwise, all technical and scientific terms used herein have the same meanings as commonly understood by one of skill in the art to which the disclosed invention belongs. Publications cited herein and the materials for which they are cited are specifically incorporated by reference.

[0136] Those skilled in the art will appreciate that numerous changes and modifications can be made to the preferred embodiments of the invention and that such changes and modifications can be made without departing from the spirit of the invention. It is, therefore, intended that the appended claims cover all such equivalent variations as fall within the true spirit and scope of the invention.

1. A nucleotide sequence encoding a chimeric polypeptide, comprising: a first nucleotide sequence encoding a light-induced oligomerization domain and a second nucleotide sequence encoding a low complexity domain from a neurodegenerative disease target protein.

2. The nucleotide sequence of claim 1, wherein the light-induced oligomerization domain is selected from the group consisting of CRYPHR, CRY2OLIG, NcVVD, NcVVDY50W, NcLOV, VfAU1, YtvA, EL222, RsLOV, and AsLOV2.

3. The nucleotide sequence of claim 2, wherein the light-induced oligomerization domain is NcVVD.

4. The nucleotide sequence of claim 2, wherein the light-induced oligomerization domain is CRY2OLIG.

5. The nucleotide sequence of claim 2, wherein the light-induced oligomerization domain is CRYPHR.

6. The nucleotide sequence of claim 1, wherein the light-induced oligomerization domain comprises a LOV domain.

7. The nucleotide sequence of claim 1, wherein the light-induced oligomerization domain comprises a PHR domain.

8. The nucleotide sequence of claim 1, wherein the low complexity domain from a neurodegenerative disease target protein is selected from the group consisting of TDP-43, Alpha synuclein, Tau, TIA1, SOD1, Huntingtin, Ataxin 2, hnRNPA2B1, EWS RNA Binding Protein 1, and TATA box binding protein factor 15.

9. The nucleotide sequence of claim 8, wherein the low complexity domain from a neurodegenerative disease target protein is TDP-43.

10. The nucleotide sequence of claim 8, wherein the low complexity domain from a neurodegenerative disease target protein is Alpha synuclein.

11. The nucleotide sequence of claim 8, wherein the low complexity domain from a neurodegenerative disease target protein is Tau.

12. An expression vector encoding a chimeric polypeptide, comprising: the nucleotide sequence of claim 1.

13. A cell comprising the nucleotide sequence of claim 1.

14. A chimeric polypeptide encoded by the nucleotide sequence of claim 1.

15. A method of inducing a neurodegenerative disease pathology in a cell, comprising the steps:
introducing into the cell an expression vector encoding a chimeric polypeptide, comprising:
the nucleotide sequence of claim 1, wherein the nucleotide sequence is operably linked to a promoter;
expressing the chimeric polypeptide; and
inducing oligomerization of the chimeric polypeptide by stimulation with blue light.

16.-21. (canceled)

22. The method of claim 15, wherein the low complexity domain from a neurodegenerative disease target protein is selected from the group consisting of TDP-43, Alpha synuclein, Tau, TIA1, SOD1, Huntingtin, Ataxin 2, hnRNPA2B1, EWS RNA Binding Protein 1, and TATA box binding protein factor 15.

23. The method of claim 22, wherein the low complexity domain from a neurodegenerative disease target protein is TDP-43.

24. The method of claim 22, wherein the low complexity domain from a neurodegenerative disease target protein is Alpha synuclein.

25. The method of claim 22, wherein the low complexity domain from a neurodegenerative disease target protein is Tau.

26.-28. (canceled)

29. A method of screening for an agent that modulates protein aggregation, comprising the steps:
introducing into a cell an expression vector encoding a chimeric polypeptide, comprising:
the nucleotide sequence of claim 1, wherein the nucleotide sequence is operably linked to a promoter;
expressing the chimeric polypeptide;
introducing the agent into a culture media comprising the cell;
inducing oligomerization of the chimeric polypeptide by stimulation with blue light; and
determining modulation of protein aggregation by the agent.

30.-42. (canceled)

43. The method of claim 15, wherein the stimulation with blue light is chronic stimulation.

The application's sequence listing, which the Patent Office published only in electronic form, follows.

SEQUENCE LISTING (102 sequences)

SEQ ID NO: 1 - skipped

SEQ ID NO: 2 - protein, 498 aa, Arabidopsis
MKMDKKTIVWFRRDLRIEDNPALAAAAHEGSVFPVFIWCPEEEGQFYPGRASRWWMKQSLAHLSQSLKALGSDLTLIKTHNTISAILDCIRVTGATKVVFNHLYDPVSLVRDHTVKEKLVERGISVQSYNGDLLYEPWEIYCEKGKPFTSFNSYWKKCLDMSIESVMLPPPWRLMPITAAAEAIWACSIEELGLENEAEKPSNALLTRAWSPGWSNADKLLNEFIEKQLIDYAKNSKKVVGNSTSLLSPYLHFGEISVRHVFQCARMKQIIWARDKNSEGEESADLFLRGIGLREYSRYICFNFPFTHEQSLLSHLRFFPWDADVDKFKAWRQGRTGYPLVDAGMRELWATGWMHNRIRVIVSSFAVKFLLLPWKWGMKYFWDTLLDADLECDILGWQYISGSIPDGHELDRLDNPALQGAKYDPEGEYIRQWLPELARLPTEWIHHPWDAPLTVLKASGVELGTNYAKPIVDIDTARELLAKAISRTRGAQIMIGAA

SEQ ID NO: 3 - protein, 119 aa, Neurospora
MTSCALILCDLKQKDTPIVYASEAFLYMTGYSNAEVLGRNCRFLQSPDGMVKPKSTRKYVDSNTINTMRKAIDRNAEVQVEVVNFKKNGQRFVNFLTMIPVRDETGEYRYSMGFQCETE

SEQ ID NO: 4 - protein, 150 aa, Neurospora
HTLYAPGGYDIMGYLIQIMNRPNPQVELGPVDTSCALILCDLKQKDTPIVYASEAFLYMTGYSNAEVLGRNCRFLQSPDGMVKPKSTRKYVDSNTINTMRKAIDRNAEVQVEVVNFKKNGQRFVNFLTMIPVRDETGEYRYSMGFQCETE

SEQ ID NO: 5 - protein, 150 aa, Neurospora
HTLYAPGGYDIMGWLIQIMNRPNPQVELGPVDTSCALILCDLKQKDTPIVYASEAFLYMTGYSNAEVLGRNCRFLQSPDGMVKPKSTRKYVDSNTINTMRKAIDRNAEVQVEVVNFKKNGQRFVNFLTMIPVRDETGEYRYSMGFQCETE

SEQ ID NO: 6 - protein, 915 aa, Artificial Sequence
  synthetic construct
MKMDKKTIVWFRRDLRIEDNPALAAAAHEGSVFPVFIWCPEEEGQFYPGRASRWWMKQSLAHLSQSLKALGSDLTLIKTHNTISAILDCIRVTGATKVVFNHLYDPVSLVRDHTVKEKLVERGISVQSYNGDLLYEPWEIYCEKGKPFTSFNSYWKKCLDMSIESVMLPPPWRLMPITAAAEAIWACSIEELGLENEAEKPSNALLTRAWSPGWSNADKLLNEFIEKQLIDYAKNSKKVVGNSTSLLSPYLHFGEISVRHVFQCARMKQIIWARDKNSEGEESADLFLRGIGLREYSRYICFNFPFTHEQSLLSHLRFFPWDADVDKFKAWRQGRTGYPLVDAGMRELWATGWMHNRIRVIVSSFAVKFLLLPWKWGMKYFWDTLLDADLECDILGWQYISGSIPDGHELDRLDNPALQGAKYDPEGEYIRQWLPELARLPTEWIHHPWDAPLTVLKASGVELGTNYAKPIVDIDTARELLAKAISRTRGAQIMIGAAARGMSEYIRVTEDENDEPIEIPSEDDGTVLLSTVTAQFPGACGLRYRNPVSQCMRGVRLVEGILHAPDAGWGNLVYVVNYPKDNKRKMDETDASSAVKVKRAVQKTSDLIVLGLPWKTTEQDLKEYFSTFGEVLMVQVKKDLKTGHSKGFGFVRFTEYETQVKVMSQRHMIDGRWCDCKLPNSKQSQDEPLRSRKVFVGRCTEDMTEDELREFFSQYGDVMDVFIPKPFRAFAFVTFADDQIAQSLCGEDLIIKGISVHISNAEPKHNSNRQLERSGRFGGNPGGFGNQGGFGNSRGGGAGLGNNQGSNMGGGMNFGAFSINPAMMAAAQAALQSSWGMMGMLASQQNQSGPSGNNQNQGNMQREPNQAFGSGNNSYSGSNSGAAIGWGSASNAGSGSGFNGGFGSSMDSKSSGWGM

SEQ ID NO: 7 - protein, 916 aa, Artificial Sequence
  synthetic construct
MSEYIRVTEDENDEPIEIPSEDDGTVLLSTVTAQFPGACGLRYRNPVSQCMRGVRLVEGILHAPDAGWGNLVYVVNYPKDNKRKMDETDASSAVKVKRAVQKTSDLIVLGLPWKTTEQDLKEYFSTFGEVLMVQVKKDLKTGHSKGFGFVRFTEYETQVKVMSQRHMIDGRWCDCKLPNSKQSQDEPLRSRKVFVGRCTEDMTEDELREFFSQYGDVMDVFIPKPFRAFAFVTFADDQIAQSLCGEDLIIKGISVHISNAEPKHNSNRQLERSGRFGGNPGGFGNQGGFGNSRGGGAGLGNNQGSNMGGGMNFGAFSINPAMMAAAQAALQSSWGMMGMLASQQNQSGPSGNNQNQGNMQREPNQAFGSGNNSYSGSNSGAAIGWGSASNAGSGSGFNGGFGSSMDSKSSGWGMLEATMKMDKKTIVWFRRDLRIEDNPALAAAAHEGSVFPVFIWCPEEEGQFYPGRASRWWMKQSLAHLSQSLKALGSDLTLIKTHNTISAILDCIRVTGATKVVFNHLYDPVSLVRDHTVKEKLVERGISVQSYNGDLLYEPWEIYCEKGKPFTSFNSYWKKCLDMSIESVMLPPPWRLMPITAAAEAIWACSIEELGLENEAEKPSNALLTRAWSPGWSNADKLLNEFIEKQLIDYAKNSKKVVGNSTSLLSPYLHFGEISVRHVFQCARMKQIIWARDKNSEGEESADLFLRGIGLREYSRYICFNFPFTHEQSLLSHLRFFPWDADVDKFKAWRQGRTGYPLVDAGMRELWATGWMHNRIRVIVSSFAVKFLLLPWKWGMKYFWDTLLDADLECDILGWQYISGSIPDGHELDRLDNPALQGAKYDPEGEYIRQWLPELARLPTEWIHHPWDAPLTVLKASGVELGTNYAKPIVDIDTARELLAKAISRTRGAQIMIGAA

SEQ ID NO: 8 - protein, 644 aa, Artificial Sequence
  synthetic construct
MGRFGGNPGGFGNQGGFGNSRGGGAGLGNNQGSNMGGGMNFGAFSINPAMMAAAQAALQSSWGMMGMLASQQNQSGPSGNNQNQGNMQREPNQAFGSGNNSYSGSNSGAAIGWGSASNAGSGSGFNGGFGSSMDSKSSGWGMLEATMKMDKKTIVWFRRDLRIEDNPALAAAAHEGSVFPVFIWCPEEEGQFYPGRASRWWMKQSLAHLSQSLKALGSDLTLIKTHNTISAILDCIRVTGATKVVFNHLYDPVSLVRDHTVKEKLVERGISVQSYNGDLLYEPWEIYCEKGKPFTSFNSYWKKCLDMSIESVMLPPPWRLMPITAAAEAIWACSIEELGLENEAEKPSNALLTRAWSPGWSNADKLLNEFIEKQLIDYAKNSKKVVGNSTSLLSPYLHFGEISVRHVFQCARMKQIIWARDKNSEGEESADLFLRGIGLREYSRYICFNFPFTHEQSLLSHLRFFPWDADVDKFKAWRQGRTGYPLVDAGMRELWATGWMHNRIRVIVSSFAVKFLLLPWKWGMKYFWDTLLDADLECDILGWQYISGSIPDGHELDRLDNPALQGAKYDPEGEYIRQWLPELARLPTEWIHHPWDAPLTVLKASGVELGTNYAKPIVDIDTARELLAKAISRTRGAQIMIGAA

SEQ ID NO: 9 - protein, 727 aa, Artificial Sequence
  synthetic construct
MRKVFVGRCTEDMTEDELREFFSQYGDVMDVFIPKPFRAFAFVTFADDQIAQSLCGEDLIIKGISVHISNAEPKHNSNRQLERSGRFGGNPGGFGNQGGFGNSRGGGAGLGNNQGSNMGGGMNFGAFSINPAMMAAAQAALQSSWGMMGMLASQQNQSGPSGNNQNQGNMQREPNQAFGSGNNSYSGSNSGAAIGWGSASNAGSGSGFNGGFGSSMDSKSSGWGMLEATMKMDKKTIVWFRRDLRIEDNPALAAAAHEGSVFPVFIWCPEEEGQFYPGRASRWWMKQSLAHLSQSLKALGSDLTLIKTHNTISAILDCIRVTGATKVVFNHLYDPVSLVRDHTVKEKLVERGISVQSYNGDLLYEPWEIYCEKGKPFTSFNSYWKKCLDMSIESVMLPPPWRLMPITAAAEAIWACSIEELGLENEAEKPSNALLTRAWSPGWSNADKLLNEFIEKQLIDYAKNSKKVVGNSTSLLSPYLHFGEISVRHVFQCARMKQIIWARDKNSEGEESADLFLRGIGLREYSRYICFNFPFTHEQSLLSHLRFFPWDADVDKFKAWRQGRTGYPLVDAGMRELWATGWMHNRIRVIVSSFAVKFLLLPWKWGMKYFWDTLLDADLECDILGWQYISGSIPDGHELDRLDNPALQGAKYDPEGEYIRQWLPELARLPTEWIHHPWDAPLTVLKASGVELGTNYAKPIVDIDTARELLAKAISRTRGAQIMIGAA

SEQ ID NO: 10 - protein, 813 aa, Artificial Sequence
  synthetic construct
MDLIVLGLPWKTTEQDLKEYFSTFGEVLMVQVKKDLKTGHSKGFGFVRFTEYETQVKVMSQRHMIDGRWCDCKLPNSKQSQDEPLRSRKVFVGRCTEDMTEDELREFFSQYGDVMDVFIPKPFRAFAFVTFADDQIAQSLCGEDLIIKGISVHISNAEPKHNSNRQLERSGRFGGNPGGFGNQGGFGNSRGGGAGLGNNQGSNMGGGMNFGAFSINPAMMAAAQAALQSSWGMMGMLASQQNQSGPSGNNQNQGNMQREPNQAFGSGNNSYSGSNSGAAIGWGSASNAGSGSGFNGGFGSSMDSKSSGWGMLEATMKMDKKTIVWFRRDLRIEDNPALAAAAHEGSVFPVFIWCPEEEGQFYPGRASRWWMKQSLAHLSQSLKALGSDLTLIKTHNTISAILDCIRVTGATKVVFNHLYDPVSLVRDHTVKEKLVERGISVQSYNGDLLYEPWEIYCEKGKPFTSFNSYWKKCLDMSIESVMLPPPWRLMPITAAAEAIWACSIEELGLENEAEKPSNALLTRAWSPGWSNADKLLNEFIEKQLIDYAKNSKKVVGNSTSLLSPYLHFGEISVRHVFQCARMKQIIWARDKNSEGEESADLFLRGIGLREYSRYICFNFPFTHEQSLLSHLRFFPWDADVDKFKAWRQGRTGYPLVDAGMRELWATGWMHNRIRVIVSSFAVKFLLLPWKWGMKYFWDTLLDADLECDILGWQYISGSIPDGHELDRLDNPALQGAKYDPEGEYIRQWLPELARLPTEWIHHPWDAPLTVLKASGVELGTNYAKPIVDIDTARELLAKAISRTRGAQIMIGAA

SEQ ID NO: 11 - protein, 642 aa, Artificial Sequence
  synthetic construct
MKMDKKTIVWFRRDLRIEDNPALAAAAHEGSVFPVFIWCPEEEGQFYPGRASRWWMKQSLAHLSQSLKALGSDLTLIKTHNTISAILDCIRVTGATKVVFNHLYDPVSLVRDHTVKEKLVERGISVQSYNGDLLYEPWEIYCEKGKPFTSFNSYWKKCLDMSIESVMLPPPWRLMPITAAAEAIWACSIEELGLENEAEKPSNALLTRAWSPGWSNADKLLNEFIEKQLIDYAKNSKKVVGNSTSLLSPYLHFGEISVRHVFQCARMKQIIWARDKNSEGEESADLFLRGIGLREYSRYICFNFPFTHEQSLLSHLRFFPWDADVDKFKAWRQGRTGYPLVDAGMRELWATGWMHNRIRVIVSSFAVKFLLLPWKWGMKYFWDTLLDADLECDILGWQYISGSIPDGHELDRLDNPALQGAKYDPEGEYIRQWLPELARLPTEWIHHPWDAPLTVLKASGVELGTNYAKPIVDIDTARELLAKAISRTRGAQIMIGAAARGGRFGGNPGGFGNQGGFGNSRGGGAGLGNNQGSNMGGGMNFGAFSINPAMMAAAQAALQSSWGMMGMLASQQNQSGPSGNNQNQGNMQREPNQAFGSGNNSYSGSNSGAAIGWGSASNAGSGSGFNGGFGSSMDSKSSGWGM

SEQ ID NO: 12 - protein, 725 aa, Artificial Sequence
  synthetic construct
MKMDKKTIVWFRRDLRIEDNPALAAAAHEGSVFPVFIWCPEEEGQFYPGRASRWWMKQSLAHLSQSLKALGSDLTLIKTHNTISAILDCIRVTGATKVVFNHLYDPVSLVRDHTVKEKLVERGISVQSYNGDLLYEPWEIYCEKGKPFTSFNSYWKKCLDMSIESVMLPPPWRLMPITAAAEAIWACSIEELGLENEAEKPSNALLTRAWSPGWSNADKLLNEFIEKQLIDYAKNSKKVVGNSTSLLSPYLHFGEISVRHVFQCARMKQIIWARDKNSEGEESADLFLRGIGLREYSRYICFNFPFTHEQSLLSHLRFFPWDADVDKFKAWRQGRTGYPLVDAGMRELWATGWMHNRIRVIVSSFAVKFLLLPWKWGMKYFWDTLLDADLECDILGWQYISGSIPDGHELDRLDNPALQGAKYDPEGEYIRQWLPELARLPTEWIHHPWDAPLTVLKASGVELGTNYAKPIVDIDTARELLAKAISRTRGAQIMIGAAARGRKVFVGRCTEDMTEDELREFFSQYGDVMDVFIPKPFRAFAFVTFADDQIAQSLCGEDLIIKGISVHISNAEPKHNSNRQLERSGRFGGNPGGFGNQGGFGNSRGGGAGLGNNQGSNMGGGMNFGAFSINPAMMAAAQAALQSSWGMMGMLASQQNQSGPSGNNQNQGNMQREPNQAFGSGNNSYSGSNSGAAIGWGSASNAGSGSGFNGGFGSSMDSKSSGWGM

SEQ ID NO: 13 - protein, 811 aa, Artificial Sequence
  synthetic construct
MKMDKKTIVWFRRDLRIEDNPALAAAAHEGSVFPVFIWCPEEEGQFYPGRASRWWMKQSLAHLSQSLKALGSDLTLIKTHNTISAILDCIRVTGATKVVFNHLYDPVSLVRDHTVKEKLVERGISVQSYNGDLLYEPWEIYCEKGKPFTSFNSYWKKCLDMSIESVMLPPPWRLMPITAAAEAIWACSIEELGLENEAEKPSNALLTRAWSPGWSNADKLLNEFIEKQLIDYAKNSKKVVGNSTSLLSPYLHFGEISVRHVFQCARMKQIIWARDKNSEGEESADLFLRGIGLREYSRYICFNFPFTHEQSLLSHLRFFPWDADVDKFKAWRQGRTGYPLVDAGMRELWATGWMHNRIRVIVSSFAVKFLLLPWKWGMKYFWDTLLDADLECDILGWQYISGSIPDGHELDRLDNPALQGAKYDPEGEYIRQWLPELARLPTEWIHHPWDAPLTVLKASGVELGTNYAKPIVDIDTARELLAKAISRTRGAQIMIGAAARGDLIVLGLPWKTTEQDLKEYFSTFGEVLMVQVKKDLKTGHSKGFGFVRFTEYETQVKVMSQRHMIDGRWCDCKLPNSKQSQDEPLRSRKVFVGRCTEDMTEDELREFFSQYGDVMDVFIPKPFRAFAFVTFADDQIAQSLCGEDLIIKGISVHISNAEPKHNSNRQLERSGRFGGNPGGFGNQGGFGNSRGGGAGLGNNQGSNMGGGMNFGAFSINPAMMAAAQAALQSSWGMMGMLASQQNQSGPSGNNQNQGNMQREPNQAFGSGNNSYSGSNSGAAIGWGSASNAGSGSGFNGGFGSSMDSKSSGWGM

SEQ ID NO: 14 - protein, 1159 aa, Artificial Sequence
  synthetic construct
MKMDKKTIVWFRRDLRIEDNPALAAAAHEGSVFPVFIWCPEEEGQFYPGRASRWWMKQSLAHLSQSLKALGSDLTLIKTHNTISAILDCIRVTGATKVVFNHLYDPVSLVRDHTVKEKLVERGISVQSYNGDLLYEPWEIYCEKGKPFTSFNSYWKKCLDMSIESVMLPPPWRLMPITAAAEAIWACSIEELGLENEAEKPSNALLTRAWSPGWSNADKLLNEFIEKQLIDYAKNSKKVVGNSTSLLSPYLHFGEISVRHVFQCARMKQIIWARDKNSEGEESADLFLRGIGLREYSRYICFNFPFTHEQSLLSHLRFFPWDADVDKFKAWRQGRTGYPLVDAGMRELWATGWMHNRIRVIVSSFAVKFLLLPWKWGMKYFWDTLLDADLECDILGWQYISGSIPDGHELDRLDNPALQGAKYDPEGEYIRQWLPELARLPTEWIHHPWDAPLTVLKASGVELGTNYAKPIVDIDTARELLAKAISRTRGAQIMIGAAARGMSEYIRVTEDENDEPIEIPSEDDGTVLLSTVTAQFPGACGLRYRNPVSQCMRGVRLVEGILHAPDAGWGNLVYVVNYPKDNKRKMDETDASSAVKVKRAVQKTSDLIVLGLPWKTTEQDLKEYFSTFGEVLMVQVKKDLKTGHSKGFGFVRFTEYETQVKVMSQRHMIDGRWCDCKLPNSKQSQDEPLRSRKVFVGRCTEDMTEDELREFFSQYGDVMDVFIPKPFRAFAFVTFADDQIAQSLCGEDLIIKGISVHISNAEPKHNSNRQLERSGRFGGNPGGFGNQGGFGNSRGGGAGLGNNQGSNMGGGMNFGAFSINPAMMAAAQAALQSSWGMMGMLASQQNQSGPSGNNQNQGNMQREPNQAFGSGNNSYSGSNSGAAIGWGSASNAGSGSGFNGGFGSSMDSKSSGWGMSRDPPVATMVSKGEEDNMAIIKEFMRFKVHMEGSVNGHEFEIEGEGEGRPYEGTQTAKLKVTKGGPLPFAWDILSPQFMYGSKAYVKHPADIPDYLKLSFPEGFKWERVMNFEDGGVVTVTQDSSLQDGEFIYKVKLRGTNFPSDGPVMQKKTMGWEASSERMYPEDGALKGEIKQRLKLKDGGHYDAEVKTTYKAKKPVQLPGAYNVNIKLDITSHNEDYTIVEQYERAEGRHSTGGMDELYK

SEQ ID NO: 15 - protein, 1160 aa, Artificial Sequence
  synthetic construct
MSEYIRVTEDENDEPIEIPSEDDGTVLLSTVTAQFPGACGLRYRNPVSQCMRGVRLVEGILHAPDAGWGNLVYVVNYPKDNKRKMDETDASSAVKVKRAVQKTSDLIVLGLPWKTTEQDLKEYFSTFGEVLMVQVKKDLKTGHSKGFGFVRFTEYETQVKVMSQRHMIDGRWCDCKLPNSKQSQDEPLRSRKVFVGRCTEDMTEDELREFFSQYGDVMDVFIPKPFRAFAFVTFADDQIAQSLCGEDLIIKGISVHISNAEPKHNSNRQLERSGRFGGNPGGFGNQGGFGNSRGGGAGLGNNQGSNMGGGMNFGAFSINPAMMAAAQAALQSSWGMMGMLASQQNQSGPSGNNQNQGNMQREPNQAFGSGNNSYSGSNSGAAIGWGSASNAGSGSGFNGGFGSSMDSKSSGWGMLEATMKMDKKTIVWFRRDLRIEDNPALAAAAHEGSVFPVFIWCPEEEGQFYPGRASRWWMKQSLAHLSQSLKALGSDLTLIKTHNTISAILDCIRVTGATKVVFNHLYDPVSLVRDHTVKEKLVERGISVQSYNGDLLYEPWEIYCEKGKPFTSFNSYWKKCLDMSIESVMLPPPWRLMPITAAAEAIWACSIEELGLENEAEKPSNALLTRAWSPGWSNADKLLNEFIEKQLIDYAKNSKKVVGNSTSLLSPYLHFGEISVRHVFQCARMKQIIWARDKNSEGEESADLFLRGIGLREYSRYICFNFPFTHEQSLLSHLRFFPWDADVDKFKAWRQGRTGYPLVDAGMRELWATGWMHNRIRVIVSSFAVKFLLLPWKWGMKYFWDTLLDADLECDILGWQYISGSIPDGHELDRLDNPALQGAKYDPEGEYIRQWLPELARLPTEWIHHPWDAPLTVLKASGVELGTNYAKPIVDIDTARELLAKAISRTRGAQIMIGAAARDPPVATMVSKGEEDNMAIIKEFMRFKVHMEGSVNGHEFEIEGEGEGRPYEGTQTAKLKVTKGGPLPFAWDILSPQFMYGSKAYVKHPADIPDYLKLSFPEGFKWERVMNFEDGGVVTVTQDSSLQDGEFIYKVKLRGTNFPSDGPVMQKKTMGWEASSERMYPEDGALKGEIKQRLKLKDGGHYDAEVKTTYKAKKPVQLPGAYNVNIKLDITSHNEDYTIVEQYERAEGRHSTGGMDELYK

SEQ ID NO: 16 - protein, 1152 aa, Artificial Sequence
  synthetic construct
MVSKGEEDNMAIIKEFMRFKVHMEGSVNGHEFEIEGEGEGRPYEGTQTAKLKVTKGGPLPFAWDILSPQFMYGSKAYVKHPADIPDYLKLSFPEGFKWERVMNFEDGGVVTVTQDSSLQDGEFIYKVKLRGTNFPSDGPVMQKKTMGWEASSERMYPEDGALKGEIKQRLKLKDGGHYDAEVKTTYKAKKPVQLPGAYNVNIKLDITSHNEDYTIVEQYERAEGRHSTGGMDELYKMSEYIRVTEDENDEPIEIPSEDDGTVLLSTVTAQFPGACGLRYRNPVSQCMRGVRLVEGILHAPDAGWGNLVYVVNYPKDNKRKMDETDASSAVKVKRAVQKTSDLIVLGLPWKTTEQDLKEYFSTFGEVLMVQVKKDLKTGHSKGFGFVRFTEYETQVKVMSQRHMIDGRWCDCKLPNSKQSQDEPLRSRKVFVGRCTEDMTEDELREFFSQYGDVMDVFIPKPFRAFAFVTFADDQIAQSLCGEDLIIKGISVHISNAEPKHNSNRQLERSGRFGGNPGGFGNQGGFGNSRGGGAGLGNNQGSNMGGGMNFGAFSINPAMMAAAQAALQSSWGMMGMLASQQNQSGPSGNNQNQGNMQREPNQAFGSGNNSYSGSNSGAAIGWGSASNAGSGSGFNGGFGSSMDSKSSGWGMLEATMKMDKKTIVWFRRDLRIEDNPALAAAAHEGSVFPVFIWCPEEEGQFYPGRASRWWMKQSLAHLSQSLKALGSDLTLIKTHNTISAILDCIRVTGATKVVFNHLYDPVSLVRDHTVKEKLVERGISVQSYNGDLLYEPWEIYCEKGKPFTSFNSYWKKCLDMSIESVMLPPPWRLMPITAAAEAIWACSIEELGLENEAEKPSNALLTRAWSPGWSNADKLLNEFIEKQLIDYAKNSKKVVGNSTSLLSPYLHFGEISVRHVFQCARMKQIIWARDKNSEGEESADLFLRGIGLREYSRYICFNFPFTHEQSLLSHLRFFPWDADVDKFKAWRQGRTGYPLVDAGMRELWATGWMHNRIRVIVSSFAVKFLLLPWKWGMKYFWDTLLDADLECDILGWQYISGSIPDGHELDRLDNPALQGAKYDPEGEYIRQWLPELARLPTEWIHHPWDAPLTVLKASGVELGTNYAKPIVDIDTARELLAKAISRTRGAQIMIGAA

SEQ ID NO: 17 - protein, 888 aa, Artificial Sequence
  synthetic construct
MGRFGGNPGGFGNQGGFGNSRGGGAGLGNNQGSNMGGGMNFGAFSINPAMMAAAQAALQSSWGMMGMLASQQNQSGPSGNNQNQGNMQREPNQAFGSGNNSYSGSNSGAAIGWGSASNAGSGSGFNGGFGSSMDSKSSGWGMLEATMKMDKKTIVWFRRDLRIEDNPALAAAAHEGSVFPVFIWCPEEEGQFYPGRASRWWMKQSLAHLSQSLKALGSDLTLIKTHNTISAILDCIRVTGATKVVFNHLYDPVSLVRDHTVKEKLVERGISVQSYNGDLLYEPWEIYCEKGKPFTSFNSYWKKCLDMSIESVMLPPPWRLMPITAAAEAIWACSIEELGLENEAEKPSNALLTRAWSPGWSNADKLLNEFIEKQLIDYAKNSKKVVGNSTSLLSPYLHFGEISVRHVFQCARMKQIIWARDKNSEGEESADLFLRGIGLREYSRYICFNFPFTHEQSLLSHLRFFPWDADVDKFKAWRQGRTGYPLVDAGMRELWATGWMHNRIRVIVSSFAVKFLLLPWKWGMKYFWDTLLDADLECDILGWQYISGSIPDGHELDRLDNPALQGAKYDPEGEYIRQWLPELARLPTEWIHHPWDAPLTVLKASGVELGTNYAKPIVDIDTARELLAKAISRTRGAQIMIGAAARDPPVATMVSKGEEDNMAIIKEFMRFKVHMEGSVNGHEFEIEGEGEGRPYEGTQTAKLKVTKGGPLPFAWDILSPQFMYGSKAYVKHPADIPDYLKLSFPEGFKWERVMNFEDGGVVTVTQDSSLQDGEFIYKVKLRGTNFPSDGPVMQKKTMGWEASSERMYPEDGALKGEIKQRLKLKDGGHYDAEVKTTYKAKKPVQLPGAYNVNIKLDITSHNEDYTIVEQYERAEGRHSTGGMDELYK

SEQ ID NO: 18 - protein, 971 aa, Artificial Sequence
  synthetic construct
MRKVFVGRCTEDMTEDELREFFSQYGDVMDVFIPKPFRAFAFVTFADDQIAQSLCGEDLIIKGISVHISNAEPKHNSNRQLERSGRFGGNPGGFGNQGGFGNSRGGGAGLGNNQGSNMGGGMNFGAFSINPAMMAAAQAALQSSWGMMGMLASQQNQSGPSGNNQNQGNMQREPNQAFGSGNNSYSGSNSGAAIGWGSASNAGSGSGFNGGFGSSMDSKSSGWGMLEATMKMDKKTIVWFRRDLRIEDNPALAAAAHEGSVFPVFIWCPEEEGQFYPGRASRWWMKQSLAHLSQSLKALGSDLTLIKTHNTISAILDCIRVTGATKVVFNHLYDPVSLVRDHTVKEKLVERGISVQSYNGDLLYEPWEIYCEKGKPFTSFNSYWKKCLDMSIESVMLPPPWRLMPITAAAEAIWACSIEELGLENEAEKPSNALLTRAWSPGWSNADKLLNEFIEKQLIDYAKNSKKVVGNSTSLLSPYLHFGEISVRHVFQCARMKQIIWARDKNSEGEESADLFLRGIGLREYSRYICFNFPFTHEQSLLSHLRFFPWDADVDKFKAWRQGRTGYPLVDAGMRELWATGWMHNRIRVIVSSFAVKFLLLPWKWGMKYFWDTLLDADLECDILGWQYISGSIPDGHELDRLDNPALQGAKYDPEGEYIRQWLPELARLPTEWIHHPWDAPLTVLKASGVELGTNYAKPIVDIDTARELLAKAISRTRGAQIMIGAAARDPPVATMVSKGEEDNMAIIKEFMRFKVHMEGSVNGHEFEIEGEGEGRPYEGTQTAKLKVTKGGPLPFAWDILSPQFMYGSKAYVKHPADIPDYLKLSFPEGFKWERVMNFEDGGVVTVTQDSSLQDGEFIYKVKLRGTNFPSDGPVMQKKTMGWEASSERMYPEDGALKGEIKQRLKLKDGGHYDAEVKTTYKAKKPVQLPGAYNVNIKLDITSHNEDYTIVEQYERAEGRHSTGGMDELYK

SEQ ID NO: 19 - protein, 1057 aa, Artificial Sequence
  synthetic construct
MDLIVLGLPWKTTEQDLKEYFSTFGEVLMVQVKKDLKTGHSKGFGFVRFTEYETQVKVMSQRHMIDGRWCDCKLPNSKQSQDEPLRSRKVFVGRCTEDMTEDELREFFSQYGDVMDVFIPKPFRAFAFVTFADDQIAQSLCGEDLIIKGISVHISNAEPKHNSNRQLERSGRFGGNPGGFGNQGGFGNSRGGGAGLGNNQGSNMGGGMNFGAFSINPAMMAAAQAALQSSWGMMGMLASQQNQSGPSGNNQNQGNMQREPNQAFGSGNNSYSGSNSGAAIGWGSASNAGSGSGFNGGFGSSMDSKSSGWGMLEATMKMDKKTIVWFRRDLRIEDNPALAAAAHEGSVFPVFIWCPEEEGQFYPGRASRWWMKQSLAHLSQSLKALGSDLTLIKTHNTISAILDCIRVTGATKVVFNHLYDPVSLVRDHTVKEKLVERGISVQSYNGDLLYEPWEIYCEKGKPFTSFNSYWKKCLDMSIESVMLPPPWRLMPITAAAEAIWACSIEELGLENEAEKPSNALLTRAWSPGWSNADKLLNEFIEKQLIDYAKNSKKVVGNSTSLLSPYLHFGEISVRHVFQCARMKQIIWARDKNSEGEESADLFLRGIGLREYSRYICFNFPFTHEQSLLSHLRFFPWDADVDKFKAWRQGRTGYPLVDAGMRELWATGWMHNRIRVIVSSFAVKFLLLPWKWGMKYFWDTLLDADLECDILGWQYISGSIPDGHELDRLDNPALQGAKYDPEGEYIRQWLPELARLPTEWIHHPWDAPLTVLKASGVELGTNYAKPIVDIDTARELLAKAISRTRGAQIMIGAAARDPPVATMVSKGEEDNMAIIKEFMRFKVHMEGSVNGHEFEIEGEGEGRPYEGTQTAKLKVTKGGPLPFAWDILSPQFMYGSKAYVKHPADIPDYLKLSFPEGFKWERVMNFEDGGVVTVTQDSSLQDGEFIYKVKLRGTNFPSDGPVMQKKTMGWEASSERMYPEDGALKGEIKQRLKLKDGGHYDAEVKTTYKAKKPVQLPGAYNVNIKLDITSHNEDYTIVEQYERAEGRHSTGGMDELYK

SEQ ID NO: 20 - protein, 878 aa, Artificial Sequence
  synthetic construct
MVSKGEEDNMAIIKEFMRFKVHMEGSVNGHEFEIEGEGEGRPYEGTQTAKLKVTKGGPLPFAWDILSPQFMYGSKAYVKHPADIPDYLKLSFPEGFKWERVMNFEDGGVVTVTQDSSLQDGEFIYKVKLRGTNFPSDGPVMQKKTMGWEASSERMYPEDGALKGEIKQRLKLKDGGHYDAEVKTTYKAKKPVQLPGAYNVNIKLDITSHNEDYTIVEQYERAEGRHSTGGMDELYKMKMDKKTIVWFRRDLRIEDNPALAAAAHEGSVFPVFIWCPEEEGQFYPGRASRWWMKQSLAHLSQSLKALGSDLTLIKTHNTISAILDCIRVTGATKVVFNHLYDPVSLVRDHTVKEKLVERGISVQSYNGDLLYEPWEIYCEKGKPFTSFNSYWKKCLDMSIESVMLPPPWRLMPITAAAEAIWACSIEELGLENEAEKPSNALLTRAWSPGWSNADKLLNEFIEKQLIDYAKNSKKVVGNSTSLLSPYLHFGEISVRHVFQCARMKQIIWARDKNSEGEESADLFLRGIGLREYSRYICFNFPFTHEQSLLSHLRFFPWDADVDKFKAWRQGRTGYPLVDAGMRELWATGWMHNRIRVIVSSFAVKFLLLPWKWGMKYFWDTLLDADLECDILGWQYISGSIPDGHELDRLDNPALQGAKYDPEGEYIRQWLPELARLPTEWIHHPWDAPLTVLKASGVELGTNYAKPIVDIDTARELLAKAISRTRGAQIMIGAAARGGRFGGNPGGFGNQGGFGNSRGGGAGLGNNQGSNMGGGMNFGAFSINPAMMAAAQAALQSSWGMMGMLASQQNQSGPSGNNQNQGNMQREPNQAFGSGNNSYSGSNSGAAIGWGSASNAGSGSGFNGGFGSSMDSKSSGWGM

SEQ ID NO: 21 - protein, 961 aa, Artificial Sequence
  synthetic construct
MVSKGEEDNMAIIKEFMRFKVHMEGSVNGHEFEIEGEGEGRPYEGTQTAKLKVTKGGPLPFAWDILSPQFMYGSKAYVKHPADIPDYLKLSFPEGFKWERVMNFEDGGVVTVTQDSSLQDGEFIYKVKLRGTNFPSDGPVMQKKTMGWEASSERMYPEDGALKGEIKQRLKLKDGGHYDAEVKTTYKAKKPVQLPGAYNVNIKLDITSHNEDYTIVEQYERAEGRHSTGGMDELYKMKMDKKTIVWFRRDLRIEDNPALAAAAHEGSVFPVFIWCPEEEGQFYPGRASRWWMKQSLAHLSQSLKALGSDLTLIKTHNTISAILDCIRVTGATKVVFNHLYDPVSLVRDHTVKEKLVERGISVQSYNGDLLYEPWEIYCEKGKPFTSFNSYWKKCLDMSIESVMLPPPWRLMPITAAAEAIWACSIEELGLENEAEKPSNALLTRAWSPGWSNADKLLNEFIEKQLIDYAKNSKKVVGNSTSLLSPYLHFGEISVRHVFQCARMKQIIWARDKNSEGEESADLFLRGIGLREYSRYICFNFPFTHEQSLLSHLRFFPWDADVDKFKAWRQGRTGYPLVDAGMRELWATGWMHNRIRVIVSSFAVKFLLLPWKWGMKYFWDTLLDADLECDILGWQYISGSIPDGHELDRLDNPALQGAKYDPEGEYIRQWLPELARLPTEWIHHPWDAPLTVLKASGVELGTNYAKPIVDIDTARELLAKAISRTRGAQIMIGAAARGRKVFVGRCTEDMTEDELREFFSQYGDVMDVFIPKPFRAFAFVTFADDQIAQSLCGEDLIIKGISVHISNAEPKHNSNRQLERSGRFGGNPGGFGNQGGFGNSRGGGAGLGNNQGSNMGGGMNFGAFSINPAMMAAAQAALQSSWGMMGMLASQQNQSGPSGNNQNQGNMQREPNQAFGSGNNSYSGSNSGAAIGWGSASNAGSGSGFNGGFGSSMDSKSSGWGM

SEQ ID NO: 22 - protein, 1047 aa, Artificial Sequence
  synthetic construct
MVSKGEEDNMAIIKEFMRFKVHMEGSVNGHEFEIEGEGEGRPYEGTQTAKLKVTKGGPLPFAWDILSPQFMYGSKAYVKHPADIPDYLKLSFPEGFKWERVMNFEDGGVVTVTQDSSLQDGEFIYKVKLRGTNFPSDGPVMQKKTMGWEASSERMYPEDGALKGEIKQRLKLKDGGHYDAEVKTTYKAKKPVQLPGAYNVNIKLDITSHNEDYTIVEQYERAEGRHSTGGMDELYKMKMDKKTIVWFRRDLRIEDNPALAAAAHEGSVFPVFIWCPEEEGQFYPGRASRWWMKQSLAHLSQSLKALGSDLTLIKTHNTISAILDCIRVTGATKVVFNHLYDPVSLVRDHTVKEKLVERGISVQSYNGDLLYEPWEIYCEKGKPFTSFNSYWKKCLDMSIESVMLPPPWRLMPITAAAEAIWACSIEELGLENEAEKPSNALLTRAWSPGWSNADKLLNEFIEKQLIDYAKNSKKVVGNSTSLLSPYLHFGEISVRHVFQCARMKQIIWARDKNSEGEESADLFLRGIGLREYSRYICFNFPFTHEQSLLSHLRFFPWDADVDKFKAWRQGRTGYPLVDAGMRELWATGWMHNRIRVIVSSFAVKFLLLPWKWGMKYFWDTLLDADLECDILGWQYISGSIPDGHELDRLDNPALQGAKYDPEGEYIRQWLPELARLPTEWIHHPWDAPLTVLKASGVELGTNYAKPIVDIDTARELLAKAISRTRGAQIMIGAAARGDLIVLGLPWKTTEQDLKEYFSTFGEVLMVQVKKDLKTGHSKGFGFVRFTEYETQVKVMSQRHMIDGRWCDCKLPNSKQSQDEPLRSRKVFVGRCTEDMTEDELREFFSQYGDVMDVFIPKPFRAFAFVTFADDQIAQSLCGEDLIIKGISVHISNAEPKHNSNRQLERSGRFGGNPGGFGNQGGFGNSRGGGAGLGNNQGSNMGGGMNFGAFSINPAMMAAAQAALQSSWGMMGMLASQQNQSGPSGNNQNQGNMQREPNQAFGSGNNSYSGSNSGAAIGWGSASNAGSGSGFNGGFGSSMDSKSSGWGM

SEQ ID NO: 23 - protein, 886 aa, Artificial Sequence
  synthetic construct
MKMDKKTIVWFRRDLRIEDNPALAAAAHEGSVFPVFIWCPEEEGQFYPGRASRWWMKQSLAHLSQSLKALGSDLTLIKTHNTISAILDCIRVTGATKVVFNHLYDPVSLVRDHTVKEKLVERGISVQSYNGDLLYEPWEIYCEKGKPFTSFNSYWKKCLDMSIESVMLPPPWRLMPITAAAEAIWACSIEELGLENEAEKPSNALLTRAWSPGWSNADKLLNEFIEKQLIDYAKNSKKVVGNSTSLLSPYLHFGEISVRHVFQCARMKQIIWARDKNSEGEESADLFLRGIGLREYSRYICFNFPFTHEQSLLSHLRFFPWDADVDKFKAWRQGRTGYPLVDAGMRELWATGWMHNRIRVIVSSFAVKFLLLPWKWGMKYFWDTLLDADLECDILGWQYISGSIPDGHELDRLDNPALQGAKYDPEGEYIRQWLPELARLPTEWIHHPWDAPLTVLKASGVELGTNYAKPIVDIDTARELLAKAISRTRGAQIMIGAAARGGRFGGNPGGFGNQGGFGNSRGGGAGLGNNQGSNMGGGMNFGAFSINPAMMAAAQAALQSSWGMMGMLASQQNQSGPSGNNQNQGNMQREPNQAFGSGNNSYSGSNSGAAIGWGSASNAGSGSGFNGGFGSSMDSKSSGWGMSRDPPVATMVSKGEEDNMAIIKEFMRFKVHMEGSVNGHEFEIEGEGEGRPYEGTQTAKLKVTKGGPLPFAWDILSPQFMYGSKAYVKHPADIPDYLKLSFPEGFKWERVMNFEDGGVVTVTQDSSLQDGEFIYKVKLRGTNFPSDGPVMQKKTMGWEASSERMYPEDGALKGEIKQRLKLKDGGHYDAEVKTTYKAKKPVQLPGAYNVNIKLDITSHNEDYTIVEQYERAEGRHSTGGMDELYK

SEQ ID NO: 24 - protein, 969 aa, Artificial Sequence
  synthetic construct
MKMDKKTIVWFRRDLRIEDNPALAAAAHEGSVFPVFIWCPEEEGQFYPGRASRWWMKQSLAHLSQSLKALGSDLTLIKTHNTISAILDCIRVTGATKVVFNHLYDPVSLVRDHTVKEKLVERGISVQSYNGDLLYEPWEIYCEKGKPFTSFNSYWKKCLDMSIESVMLPPPWRLMPITAAAEAIWACSIEELGLENEAEKPSNALLTRAWSPGWSNADKLLNEFIEKQLIDYAKNSKKVVGNSTSLLSPYLHFGEISVRHVFQCARMKQIIWARDKNSEGEESADLFLRGIGLREYSRYICFNFPFTHEQSLLSHLRFFPWDADVDKFKAWRQGRTGYPLVDAGMRELWATGWMHNRIRVIVSSFAVKFLLLPWKWGMKYFWDTLLDADLECDILGWQYISGSIPDGHELDRLDNPALQGAKYDPEGEYIRQWLPELARLPTEWIHHPWDAPLTVLKASGVELGTNYAKPIVDIDTARELLAKAISRTRGAQIMIGAAARGRKVFVGRCTEDMTEDELREFFSQYGDVMDVFIPKPFRAFAFVTFADDQIAQSLCGEDLIIKGISVHISNAEPKHNSNRQLERSGRFGGNPGGFGNQGGFGNSRGGGAGLGNNQGSNMGGGMNFGAFSINPAMMAAAQAALQSSWGMMGMLASQQNQSGPSGNNQNQGNMQREPNQAFGSGNNSYSGSNSGAAIGWGSASNAGSGSGFNGGFGSSMDSKSSGWGMSRDPPVATMVSKGEEDNMAIIKEFMRFKVHMEGSVNGHEFEIEGEGEGRPYEGTQTAKLKVTKGGPLPFAWDILSPQFMYGSKAYVKHPADIPDYLKLSFPEGFKWERVMNFEDGGVVTVTQDSSLQDGEFIYKVKLRGTNFPSDGPVMQKKTMGWEASSERMYPEDGALKGEIKQRLKLKDGGHYDAEVKTTYKAKKPVQLPGAYNVNIKLDITSHNEDYTIVEQYERAEGRHSTGGMDELYK

SEQ ID NO: 25 - protein, 1057 aa, Artificial Sequence
  synthetic construct
MDLIVLGLPWKTTEQDLKEYFSTFGEVLMVQVKKDLKTGHSKGFGFVRFTEYETQVKVMSQRHMIDGRWCDCKLPNSKQSQDEPLRSRKVFVGRCTEDMTEDELREFFSQYGDVMDVFIPKPFRAFAFVTFADDQIAQSLCGEDLIIKGISVHISNAEPKHNSNRQLERSGRFGGNPGGFGNQGGFGNSRGGGAGLGNNQGSNMGGGMNFGAFSINPAMMAAAQAALQSSWGMMGMLASQQNQSGPSGNNQNQGNMQREPNQAFGSGNNSYSGSNSGAAIGWGSASNAGSGSGFNGGFGSSMDSKSSGWGMLEATMKMDKKTIVWFRRDLRIEDNPALAAAAHEGSVFPVFIWCPEEEGQFYPGRASRWWMKQSLAHLSQSLKALGSDLTLIKTHNTISAILDCIRVTGATKVVFNHLYDPVSLVRDHTVKEKLVERGISVQSYNGDLLYEPWEIYCEKGKPFTSFNSYWKKCLDMSIESVMLPPPWRLMPITAAAEAIWACSIEELGLENEAEKPSNALLTRAWSPGWSNADKLLNEFIEKQLIDYAKNSKKVVGNSTSLLSPYLHFGEISVRHVFQCARMKQIIWARDKNSEGEESADLFLRGIGLREYSRYICFNFPFTHEQSLLSHLRFFPWDADVDKFKAWRQGRTGYPLVDAGMRELWATGWMHNRIRVIVSSFAVKFLLLPWKWGMKYFWDTLLDADLECDILGWQYISGSIPDGHELDRLDNPALQGAKYDPEGEYIRQWLPELARLPTEWIHHPWDAPLTVLKASGVELGTNYAKPIVDIDTARELLAKAISRTRGAQIMIGAASRDPPVATMVSKGEEDNMAIIKEFMRFKVHMEGSVNGHEFEIEGEGEGRPYEGTQTAKLKVTKGGPLPFAWDILSPQFMYGSKAYVKHPADIPDYLKLSFPEGFKWERVMNFEDGGVVTVTQDSSLQDGEFIYKVKLRGTNFPSDGPVMQKKTMGWEASSERMYPEDGALKGEIKQRLKLKDGGHYDAEVKTTYKAKKPVQLPGAYNVNIKLDITSHNEDYTIVEQYERAEGRHSTGGMDELYK

SEQ ID NO: 26 - protein, 566 aa, Artificial Sequence
  synthetic construct
MHTLYAPGGYDIMGWLIQIMNRPNPQVELGPVDTSCALILCDLKQKDTPIVYASEAFLYMTGYSNAEVLGRNCRFLQSPDGMVKPKSTRKYVDSNTINTMRKAIDRNAEVQVEVVNFKKNGQRFVNFLTMIPVRDETGEYRYSMGFQCETEAMSEYIRVTEDENDEPIEIPSEDDGTVLLSTVTAQFPGACGLRYRNPVSQCMRGVRLVEGILHAPDAGWGNLVYVVNYPKDNKRKMDETDASSAVKVKRAVQKTSDLIVLGLPWKTTEQDLKEYFSTFGEVLMVQVKKDLKTGHSKGFGFVRFTEYETQVKVMSQRHMIDGRWCDCKLPNSKQSQDEPLRSRKVFVGRCTEDMTEDELREFFSQYGDVMDVFIPKPFRAFAFVTFADDQIAQSLCGEDLIIKGISVHISNAEPKHNSNRQLERSGRFGGNPGGFGNQGGFGNSRGGGAGLGNNQGSNMGGGMNFGAFSINPAMMAAAQAALQSSWGMMGMLASQQNQSGPSGNNQNQGNMQREPNQAFGSGNNSYSGSNSGAAIGWGSASNAGSGSGFNGGFGSSMDSKSSGWGM

SEQ ID NO: 27 - protein, 569 aa, Artificial Sequence
  synthetic construct
MSEYIRVTEDENDEPIEIPSEDDGTVLLSTVTAQFPGACGLRYRNPVSQCMRGVRLVEGILHAPDAGWGNLVYVVNYPKDNKRKMDETDASSAVKVKRAVQKTSDLIVLGLPWKTTEQDLKEYFSTFGEVLMVQVKKDLKTGHSKGFGFVRFTEYETQVKVMSQRHMIDGRWCDCKLPNSKQSQDEPLRSRKVFVGRCTEDMTEDELREFFSQYGDVMDVFIPKPFRAFAFVTFADDQIAQSLCGEDLIIKGISVHISNAEPKHNSNRQLERSGRFGGNPGGFGNQGGFGNSRGGGAGLGNNQGSNMGGGMNFGAFSINPAMMAAAQAALQSSWGMMGMLASQQNQSGPSGNNQNQGNMQREPNQAFGSGNNSYSGSNSGAAIGWGSASNAGSGSGFNGGFGSSMDSKSSGWGMFRAQRHTLYAPGGYDIMGWLIQIMNRPNPQVELGPVDTSCALILCDLKQKDTPIVYASEAFLYMTGYSNAEVLGRNCRFLQSPDGMVKPKSTRKYVDSNTINTMRKAIDRNAEVQVEVVNFKKNGQRFVNFLTMIPVRDETGEYRYSMGFQCETE

SEQ ID NO: 28 - protein, 466 aa, Artificial Sequence
  synthetic construct
MDLIVLGLPWKTTEQDLKEYFSTFGEVLMVQVKKDLKTGHSKGFGFVRFTEYETQVKVMSQRHMIDGRWCDCKLPNSKQSQDEPLRSRKVFVGRCTEDMTEDELREFFSQYGDVMDVFIPKPFRAFAFVTFADDQIAQSLCGEDLIIKGISVHISNAEPKHNSNRQLERSGRFGGNPGGFGNQGGFGNSRGGGAGLGNNQGSNMGGGMNFGAFSINPAMMAAAQAALQSSWGMMGMLASQQNQSGPSGNNQNQGNMQREPNQAFGSGNNSYSGSNSGAAIGWGSASNAGSGSGFNGGFGSSMDSKSSGWGMFRAQRHTLYAPGGYDIMGWLIQIMNRPNPQVELGPVDTSCALILCDLKQKDTPIVYASEAFLYMTGYSNAEVLGRNCRFLQSPDGMVKPKSTRKYVDSNTINTMRKAIDRNAEVQVEVVNFKKNGQRFVNFLTMIPVRDETGEYRYSMGFQCETE

SEQ ID NO: 29 - protein, 380 aa, Artificial Sequence
  synthetic construct
MRKVFVGRCTEDMTEDELREFFSQYGDVMDVFIPKPFRAFAFVTFADDQIAQSLCGEDLIIKGISVHISNAEPKHNSNRQLERSGRFGGNPGGFGNQGGFGNSRGGGAGLGNNQGSNMGGGMNFGAFSINPAMMAAAQAALQSSWGMMGMLASQQNQSGPSGNNQNQGNMQREPNQAFGSGNNSYSGSNSGAAIGWGSASNAGSGSGFNGGFGSSMDSKSSGWGMFRAQRHTLYAPGGYDIMGWLIQIMNRPNPQVELGPVDTSCALILCDLKQKDTPIVYASEAFLYMTGYSNAEVLGRNCRFLQSPDGMVKPKSTRKYVDSNTINTMRKAIDRNAEVQVEVVNFKKNGQRFVNFLTMIPVRDETGEYRYSMGFQCETE

SEQ ID NO: 30 - protein, 297 aa, Artificial Sequence
  synthetic construct
MGRFGGNPGGFGNQGGFGNSRGGGAGLGNNQGSNMGGGMNFGAFSINPAMMAAAQAALQSSWGMMGMLASQQNQSGPSGNNQNQGNMQREPNQAFGSGNNSYSGSNSGAAIGWGSASNAGSGSGFNGGFGSSMDSKSSGWGMFRAQRHTLYAPGGYDIMGWLIQIMNRPNPQVELGPVDTSCALILCDLKQKDTPIVYASEAFLYMTGYSNAEVLGRNCRFLQSPDGMVKPKSTRKYVDSNTINTMRKAIDRNAEVQVEVVNFKKNGQRFVNFLTMIPVRDETGEYRYSMGFQCETE

SEQ ID NO: 31 - protein, 462 aa, Artificial Sequence
  synthetic construct
MHTLYAPGGYDIMGWLIQIMNRPNPQVELGPVDTSCALILCDLKQKDTPIVYASEAFLYMTGYSNAEVLGRNCRFLQSPDGMVKPKSTRKYVDSNTINTMRKAIDRNAEVQVEVVNFKKNGQRFVNFLTMIPVRDETGEYRYSMGFQCETEADLIVLGLPWKTTEQDLKEYFSTFGEVLMVQVKKDLKTGHSKGFGFVRFTEYETQVKVMSQRHMIDGRWCDCKLPNSKQSQDEPLRSRKVFVGRCTEDMTEDELREFFSQYGDVMDVFIPKPFRAFAFVTFADDQIAQSLCGEDLIIKGISVHISNAEPKHNSNRQLERSGRFGGNPGGFGNQGGFGNSRGGGAGLGNNQGSNMGGGMNFGAFSINPAMMAAAQAALQSSWGMMGMLASQQNQSGPSGNNQNQGNMQREPNQAFGSGNNSYSGSNSGAAIGWGSASNAGSGSGFNGGFGSSMDSKSSGWGM

SEQ ID NO: 32 - protein, 376 aa, Artificial Sequence
  synthetic construct
MHTLYAPGGYDIMGWLIQIMNRPNPQVELGPVDTSCALILCDLKQKDTPIVYASEAFLYMTGYSNAEVLGRNCRFLQSPDGMVKPKSTRKYVDSNTINTMRKAIDRNAEVQVEVVNFKKNGQRFVNFLTMIPVRDETGEYRYSMGFQCETEARKVFVGRCTEDMTEDELREFFSQYGDVMDVFIPKPFRAFAFVTFADDQIAQSLCGEDLIIKGISVHISNAEPKHNSNRQLERSGRFGGNPGGFGNQGGFGNSRGGGAGLGNNQGSNMGGGMNFGAFSINPAMMAAAQAALQSSWGMMGMLASQQNQSGPSGNNQNQGNMQREPNQAFGSGNNSYSGSNSGAAIGWGSASNAGSGSGFNGGFGSSMDSKSSGWGM

SEQ ID NO: 33 - protein, 292 aa, Artificial Sequence
  synthetic construct
HTLYAPGGYDIMGWLIQIMNRPNPQVELGPVDTSCALILCDLKQKDTPIVYASEAFLYMTGYSNAEVLGRNCRFLQSPDGMVKPKSTRKYVDSNTINTMRKAIDRNAEVQVEVVNFKKNGQRFVNFLTMIPVRDETGEYRYSMGFQCETEAGRFGGNPGGFGNQGGFGNSRGGGAGLGNNQGSNMGGGMNFGAFSINPAMMAAAQAALQSSWGMMGMLASQQNQSGPSGNNQNQGNMQREPNQAFGSGNNSYSGSNSGAAIGWGSASNAGSGSGFNGGFGSSMDSKSSGWGM

SEQ ID NO: 34 - protein, 808 aa, Artificial Sequence
  synthetic construct
MHTLYAPGGYDIMGWLIQIMNRPNPQVELGPVDTSCALILCDLKQKDTPIVYASEAFLYMTGYSNAEVLGRNCRFLQSPDGMVKPKSTRKYVDSNTINTMRKAIDRNAEVQVEVVNFKKNGQRFVNFLTMIPVRDETGEYRYSMGFQCETEAMSEYIRVTEDENDEPIEIPSEDDGTVLLSTVTAQFPGACGLRYRNPVSQCMRGVRLVEGILHAPDAGWGNLVYVVNYPKDNKRKMDETDASSAVKVKRAVQKTSDLIVLGLPWKTTEQDLKEYFSTFGEVLMVQVKKDLKTGHSKGFGFVRFTEYETQVKVMSQRHMIDGRWCDCKLPNSKQSQDEPLRSRKVFVGRCTEDMTEDELREFFSQYGDVMDVFIPKPFRAFAFVTFADDQIAQSLCGEDLIIKGISVHISNAEPKHNSNRQLERSGRFGGNPGGFGNQGGFGNSRGGGAGLGNNQGSNMGGGMNFGAFSINPAMMAAAQAALQSSWGMMGMLASQQNQSGPSGNNQNQGNMQREPNQAFGSGNNSYSGSNSGAAIGWGSASNAGSGSGFNGGFGSSMDSKSSGWGMFAPVATMVSKGEEDNMAIIKEFMRFKVHMEGSVNGHEFEIEGEGEGRPYEGTQTAKLKVTKGGPLPFAWDILSPQFMYGSKAYVKHPADIPDYLKLSFPEGFKWERVMNFEDGGVVTVTQDSSLQDGEFIYKVKLRGTNFPSDGPVMQKKTMGWEASSERMYPEDGALKGEIKQRLKLKDGGHYDAEVKTTYKAKKPVQLPGAYNVNIKLDITSHNEDYTIVEQYERAEGRHSTGGMDELYK

SEQ ID NO: 35 - protein, 809 aa, Artificial Sequence
  synthetic construct
MVSKGEEDNMAIIKEFMRFKVHMEGSVNGHEFEIEGEGEGRPYEGTQTAKLKVTKGGPLPFAWDILSPQFMYGSKAYVKHPADIPDYLKLSFPEGFKWERVMNFEDGGVVTVTQDSSLQDGEFIYKVKLRGTNFPSDGPVMQKKTMGWEASSERMYPEDGALKGEIKQRLKLKDGGHYDAEVKTTYKAKKPVQLPGAYNVNIKLDITSHNEDYTIVEQYERAEGRHSTGGMDELYKSGLKMSEYIRVTEDENDEPIEIPSEDDGTVLLSTVTAQFPGACGLRYRNPVSQCMRGVRLVEGILHAPDAGWGNLVYVVNYPKDNKRKMDETDASSAVKVKRAVQKTSDLIVLGLPWKTTEQDLKEYFSTFGEVLMVQVKKDLKTGHSKGFGFVRFTEYETQVKVMSQRHMIDGRWCDCKLPNSKQSQDEPLRSRKVFVGRCTEDMTEDELREFFSQYGDVMDVFIPKPFRAFAFVTFADDQIAQSLCGEDLIIKGISVHISNAEPKHNSNRQLERSGRFGGNPGGFGNQGGFGNSRGGGAGLGNNQGSNMGGGMNFGAFSINPAMMAAAQAALQSSWGMMGMLASQQNQSGPSGNNQNQGNMQREPNQAFGSGNNSYSGSNSGAAIGWGSASNAGSGSGFNGGFGSSMDSKSSGWGMFRAQRHTLYAPGGYDIMGWLIQIMNRPNPQVELGPVDTSCALILCDLKQKDTPIVYASEAFLYMTGYSNAEVLGRNCRFLQSPDGMVKPKSTRKYVDSNTINTMRKAIDRNAEVQVEVVNFKKNGQRFVNFLTMIPVRDETGEYRYSMGFQCETE

SEQ ID NO: 36 - protein, 705 aa, Artificial Sequence
  synthetic construct
MVSKGEEDNMAIIKEFMRFKVHMEGSVNGHEFEIEGEGEGRPYEGTQTAKLKVTKGGPLPFAWDILSPQFMYGSKAYVKHPADIPDYLKLSFPEGFKWERVMNFEDGGVVTVTQDSSLQDGEFIYKVKLRGTNFPSDGPVMQKKTMGWEASSERMYPEDGALKGEIKQRLKLKDGGHYDAEVKTTYKAKKPVQLPGAYNVNIKLDITSHNEDYTIVEQYERAEGRHSTGGMDELYKSGLKDLIVLGLPWKTTEQDLKEYFSTFGEVLMVQVKKDLKTGHSKGFGFVRFTEYETQVKVMSQRHMIDGRWCDCKLPNSKQSQDEPLRSRKVFVGRCTEDMTEDELREFFSQYGDVMDVFIPKPFRAFAFVTFADDQIAQSLCGEDLIIKGISVHISNAEPKHNSNRQLERSGRFGGNPGGFGNQGGFGNSRGGGAGLGNNQGSNMGGGMNFGAFSINPAMMAAAQAALQSSWGMMGMLASQQNQSGPSGNNQNQGNMQREPNQAFGSGNNSYSGSNSGAAIGWGSASNAGSGSGFNGGFGSSMDSKSSGWGMFRAQRHTLYAPGGYDIMGWLIQIMNRPNPQVELGPVDTSCALILCDLKQKDTPIVYASEAFLYMTGYSNAEVLGRNCRFLQSPDGMVKPKSTRKYVDSNTINTMRKAIDRNAEVQVEVVNFKKNGQRFVNFLTMIPVRDETGEYRYSMGFQCETE

SEQ ID NO: 37 - protein, 619 aa, Artificial Sequence
  synthetic construct
MVSKGEEDNMAIIKEFMRFKVHMEGSVNGHEFEIEGEGEGRPYEGTQTAKLKVTKGGPLPFAWDILSPQFMYGSKAYVKHPADIPDYLKLSFPEGFKWERVMNFEDGGVVTVTQDSSLQDGEFIYKVKLRGTNFPSDGPVMQKKTMGWEASSERMYPEDGALKGEIKQRLKLKDGGHYDAEVKTTYKAKKPVQLPGAYNVNIKLDITSHNEDYTIVEQYERAEGRHSTGGMDELYKSGLKRKVFVGRCTEDMTEDELREFFSQYGDVMDVFIPKPFRAFAFVTFADDQIAQSLCGEDLIIKGISVHISNAEPKHNSNRQLERSGRFGGNPGGFGNQGGFGNSRGGGAGLGNNQGSNMGGGMNFGAFSINPAMMAAAQAALQSSWGMMGMLASQQNQSGPSGNNQNQGNMQREPNQAFGSGNNSYSGSNSGAAIGWGSASNAGSGSGFNGGFGSSMDSKSSGWGMFRAQRHTLYAPGGYDIMGWLIQIMNRPNPQVELGPVDTSCALILCDLKQKDTPIVYASEAFLYMTGYSNAEVLGRNCRFLQSPDGMVKPKSTRKYVDSNTINTMRKAIDRNAEVQVEVVNFKKNGQRFVNFLTMIPVRDETGEYRYSMGFQCETE

SEQ ID NO: 38 - protein, 536 aa, Artificial Sequence
  synthetic construct
MVSKGEEDNMAIIKEFMRFKVHMEGSVNGHEFEIEGEGEGRPYEGTQTAKLKVTKGGPLPFAWDILSPQFMYGSKAYVKHPADIPDYLKLSFPEGFKWERVMNFEDGGVVTVTQDSSLQDGEFIYKVKLRGTNFPSDGPVMQKKTMGWEASSERMYPEDGALKGEIKQRLKLKDGGHYDAEVKTTYKAKKPVQLPGAYNVNIKLDITSHNEDYTIVEQYERAEGRHSTGGMDELYKSGLKGRFGGNPGGFGNQGGFGNSRGGGAGLGNNQGSNMGGGMNFGAFSINPAMMAAAQAALQSSWGMMGMLASQQNQSGPSGNNQNQGNMQREPNQAFGSGNNSYSGSNSGAAIGWGSASNAGSGSGFNGGFGSSMDSKSSGWGMFRAQRHTLYAPGGYDIMGWLIQIMNRPNPQVELGPVDTSCALILCDLKQKDTPIVYASEAFLYMTGYSNAEVLGRNCRFLQSPDGMVKPKSTRKYVDSNTINTMRKAIDRNAEVQVEVVNFKKNGQRFVNFLTMIPVRDETGEYRYSMGFQCETE

SEQ ID NO: 39 - protein, 704 aa, Artificial Sequence
  synthetic construct
MHTLYAPGGYDIMGWLIQIMNRPNPQVELGPVDTSCALILCDLKQKDTPIVYASEAFLYMTGYSNAEVLGRNCRFLQSPDGMVKPKSTRKYVDSNTINTMRKAIDRNAEVQVEVVNFKKNGQRFVNFLTMIPVRDETGEYRYSMGFQCETEADLIVLGLPWKTTEQDLKEYFSTFGEVLMVQVKKDLKTGHSKGFGFVRFTEYETQVKVMSQRHMIDGRWCDCKLPNSKQSQDEPLRSRKVFVGRCTEDMTEDELREFFSQYGDVMDVFIPKPFRAFAFVTFADDQIAQSLCGEDLIIKGISVHISNAEPKHNSNRQLERSGRFGGNPGGFGNQGGFGNSRGGGAGLGNNQGSNMGGGMNFGAFSINPAMMAAAQAALQSSWGMMGMLASQQNQSGPSGNNQNQGNMQREPNQAFGSGNNSYSGSNSGAAIGWGSASNAGSGSGFNGGFGSSMDSKSSGWGMFAPVATMVSKGEEDNMAIIKEFMRFKVHMEGSVNGHEFEIEGEGEGRPYEGTQTAKLKVTKGGPLPFAWDILSPQFMYGSKAYVKHPADIPDYLKLSFPEGFKWERVMNFEDGGVVTVTQDSSLQDGEFIYKVKLRGTNFPSDGPVMQKKTMGWEASSERMYPEDGALKGEIKQRLKLKDGGHYDAEVKTTYKAKKPVQLPGAYNVNIKLDITSHNEDYTIVEQYERAEGRHSTGGMDELYK

SEQ ID NO: 40 - protein, 618 aa, Artificial Sequence
  synthetic construct
MHTLYAPGGYDIMGWLIQIMNRPNPQVELGPVDTSCALILCDLKQKDTPIVYASEAFLYMTGYSNAEVLGRNCRFLQSPDGMVKPKSTRKYVDSNTINTMRKAIDRNAEVQVEVVNFKKNGQRFVNFLTMIPVRDETGEYRYSMGFQCETEARKVFVGRCTEDMTEDELREFFSQYGDVMDVFIPKPFRAFAFVTFADDQIAQSLCGEDLIIKGISVHISNAEPKHNSNRQLERSGRFGGNPGGFGNQGGFGNSRGGGAGLGNNQGSNMGGGMNFGAFSINPAMMAAAQAALQSSWGMMGMLASQQNQSGPSGNNQNQGNMQREPNQAFGSGNNSYSGSNSGAAIGWGSASNAGSGSGFNGGFGSSMDSKSSGWGMFAPVATMVSKGEEDNMAIIKEFMRFKVHMEGSVNGHEFEIEGEGEGRPYEGTQTAKLKVTKGGPLPFAWDILSPQFMYGSKAYVKHPADIPDYLKLSFPEGFKWERVMNFEDGGVVTVTQDSSLQDGEFIYKVKLRGTNFPSDGPVMQKKTMGWEASSERMYPEDGALKGEIKQRLKLKDGGHYDAEVKTTYKAKKPVQLPGAYNVNIKLDITSHNEDYTIVEQYERAEGRHSTGGMDELYK

SEQ ID NO: 41 - protein, 535 aa, Artificial Sequence
  synthetic construct
MHTLYAPGGYDIMGWLIQIMNRPNPQVELGPVDTSCALILCDLKQKDTPIVYASEAFLYMTGYSNAEVLGRNCRFLQSPDGMVKPKSTRKYVDSNTINTMRKAIDRNAEVQVEVVNFKKNGQRFVNFLTMIPVRDETGEYRYSMGFQCETEAGRFGGNPGGFGNQGGFGNSRGGGAGLGNNQGSNMGGGMNFGAFSINPAMMAAAQAALQSSWGMMGMLASQQNQSGPSGNNQNQGNMQREPNQAFGSGNNSYSGSNSGAAIGWGSASNAGSGSGFNGGFGSSMDSKSSGWGMFAPVATMVSKGEEDNMAIIKEFMRFKVHMEGSVNGHEFEIEGEGEGRPYEGTQTAKLKVTKGGPLPFAWDILSPQFMYGSKAYVKHPADIPDYLKLSFPEGFKWERVMNFEDGGVVTVTQDSSLQDGEFIYKVKLRGTNFPSDGPVMQKKTMGWEASSERMYPEDGALKGEIKQRLKLKDGGHYDAEVKTTYKAKKPVQLPGAYNVNIKLDITSHNEDYTIVEQYERAEGRHSTGGMDELYK

SEQ ID NO: 42 - protein, 639 aa, Artificial Sequence
  synthetic construct
MKMDKKTIVWFRRDLRIEDNPALAAAAHEGSVFPVFIWCPEEEGQFYPGRASRWWMKQSLAHLSQSLKALGSDLTLIKTHNTISAILDCIRVTGATKVVFNHLYDPVSLVRDHTVKEKLVERGISVQSYNGDLLYEPWEIYCEKGKPFTSFNSYWKKCLDMSIESVMLPPPWRLMPITAAAEAIWACSIEELGLENEAEKPSNALLTRAWSPGWSNADKLLNEFIEKQLIDYAKNSKKVVGNSTSLLSPYLHFGEISVRHVFQCARMKQIIWARDKNSEGEESADLFLRGIGLREYSRYICFNFPFTHEQSLLSHLRFFPWDADVDKFKAWRQGRTGYPLVDAGMRELWATGWMHNRIRVIVSSFAVKFLLLPWKWGMKYFWDTLLDADLECDILGWQYISGSIPDGHELDRLDNPALQGAKYDPEGEYIRQWLPELARLPTEWIHHPWDAPLTVLKASGVELGTNYAKPIVDIDTARELLAKAISRTRGAQIMIGAAAMDVFMKGLSKAKEGVVAAAEKTKQGVAEAAGKTKEGVLYVGSKTKEGVVHGVATVAEKTKEQVTNVGGAVVTGVTAVAQKTVEGAGSIAAATGFVKKDQLGKNEEGAPQEGILEDMPVDPDNEAYEMPSEEGYQDYEPEA

SEQ ID NO: 43 - protein, 644 aa, Artificial Sequence
  synthetic construct
MDVFMKGLSKAKEGVVAAAEKTKQGVAEAAGKTKEGVLYVGSKTKEGVVHGVATVAEKTKEQVTNVGGAVVTGVTAVAQKTVEGAGSIAAATGFVKKDQLGKNEEGAPQEGILEDMPVDPDNEAYEMPSEEGYQDYEPEADPPVATMKMDKKTIVWFRRDLRIEDNPALAAAAHEGSVFPVFIWCPEEEGQFYPGRASRWWMKQSLAHLSQSLKALGSDLTLIKTHNTISAILDCIRVTGATKVVFNHLYDPVSLVRDHTVKEKLVERGISVQSYNGDLLYEPWEIYCEKGKPFTSFNSYWKKCLDMSIESVMLPPPWRLMPITAAAEAIWACSIEELGLENEAEKPSNALLTRAWSPGWSNADKLLNEFIEKQLIDYAKNSKKVVGNSTSLLSPYLHFGEISVRHVFQCARMKQIIWARDKNSEGEESADLFLRGIGLREYSRYICFNFPFTHEQSLLSHLRFFPWDADVDKFKAWRQGRTGYPLVDAGMRELWATGWMHNRIRVIVSSFAVKFLLLPWKWGMKYFWDTLLDADLECDILGWQYISGSIPDGHELDRLDNPALQGAKYDPEGEYIRQWLPELARLPTEWIHHPWDAPLTVLKASGVELGTNYAKPIVDIDTARELLAKAISRTRGAQIMIGAA

SEQ ID NO: 44 - protein, 881 aa, Artificial Sequence
  synthetic construct
MKMDKKTIVWFRRDLRIEDNPALAAAAHEGSVFPVFIWCPEEEGQFYPGRASRWWMKQSLAHLSQSLKALGSDLTLIKTHNTISAILDCIRVTGATKVVFNHLYDPVSLVRDHTVKEKLVERGISVQSYNGDLLYEPWEIYCEKGKPFTSFNSYWKKCLDMSIESVMLPPPWRLMPITAAAEAIWACSIEELGLENEAEKPSNALLTRAWSPGWSNADKLLNEFIEKQLIDYAKNSKKVVGNSTSLLSPYLHFGEISVRHVFQCARMKQIIWARDKNSEGEESADLFLRGIGLREYSRYICFNFPFTHEQSLLSHLRFFPWDADVDKFKAWRQGRTGYPLVDAGMRELWATGWMHNRIRVIVSSFAVKFLLLPWKWGMKYFWDTLLDADLECDILGWQYISGSIPDGHELDRLDNPALQGAKYDPEGEYIRQWLPELARLPTEWIHHPWDAPLTVLKASGVELGTNYAKPIVDIDTARELLAKAISRTRGAQIMIGAAAMDVFMKGLSKAKEGVVAAAEKTKQGVAEAAGKTKEGVLYVGSKTKEGVVHGVATVAEKTKEQVTNVGGAVVTGVTAVAQKTVEGAGSIAAATGFVKKDQLGKNEEGAPQEGILEDMPVDPDNEAYEMPSEEGYQDYEPEADPPVATMVSKGEEDNMAIIKEFMRFKVHMEGSVNGHEFEIEGEGEGRPYEGTQTAKLKVTKGGPLPFAWDILSPQFMYGSKAYVKHPADIPDYLKLSFPEGFKWERVMNFEDGGVVTVTQDSSLQDGEFIYKVKLRGTNFPSDGPVMQKKTMGWEASSERMYPEDGALKGEIKQRLKLKDGGHYDAEVKTTYKAKKPVQLPGAYNVNIKLDITSHNEDYTIVEQYERAEGRHSTGGMDELYK

SEQ ID NO: 45 - protein, 882 aa, Artificial Sequence
  synthetic construct
MKMDKKTIVWFRRDLRIEDNPALAAAAHEGSVFPVFIWCPEEEGQFYPGRASRWWMKQSLAHLSQSLKALGSDLTLIKTHNTISAILDCIRVTGATKVVFNHLYDPVSLVRDHTVKEKLVERGISVQSYNGDLLYEPWEIYCEKGKPFTSFNSYWKKCLDMSIESVMLPPPWRLMPITAAAEAIWACSIEELGLENEAEKPSNALLTRAWSPGWSNADKLLNEFIEKQLIDYAKNSKKVVGNSTSLLSPYLHFGEISVRHVFQCARMKQIIWARDKNSEGEESADLFLRGIGLREYSRYICFNFPFTHEQSLLSHLRFFPWDADVDKFKAWRQGRTGYPLVDAGMRELWATGWMHNRIRVIVSSFAVKFLLLPWKWGMKYFWDTLLDADLECDILGWQYISGSIPDGHELDRLDNPALQGAKYDPEGEYIRQWLPELARLPTEWIHHPWDAPLTVLKASGVELGTNYAKPIVDIDTARELLAKAISRTRGAQIMIGAAARDPPVATMVSKGEEDNMAIIKEFMRFKVHMEGSVNGHEFEIEGEGEGRPYEGTQTAKLKVTKGGPLPFAWDILSPQFMYGSKAYVKHPADIPDYLKLSFPEGFKWERVMNFEDGGVVTVTQDSSLQDGEFIYKVKLRGTNFPSDGPVMQKKTMGWEASSERMYPEDGALKGEIKQRLKLKDGGHYDAEVKTTYKAKKPVQLPGAYNVNIKLDITSHNEDYTIVEQYERAEGRHSTGGMDELYKMDVFMKGLSKAKEGVVAAAEKTKQGVAEAAGKTKEGVLYVGSKTKEGVVHGVATVAEKTKEQVTNVGGAVVTGVTAVAQKTVEGAGSIAAATGFVKKDQLGKNEEGAPQEGILEDMPVDPDNEAYEMPSEEGYQDYEPEA

SEQ ID NO: 46 - protein, 881 aa, Artificial Sequence
  synthetic construct
MDVFMKGLSKAKEGVVAAAEKTKQGVAEAAGKTKEGVLYVGSKTKEGVVHGVATVAEKTKEQVTNVGGAVVTGVTAVAQKTVEGAGSIAAATGFVKKDQLGKNEEGAPQEGILEDMPVDPDNEAYEMPSEEGYQDYEPEADPPVATMKMDKKTIVWFRRDLRIEDNPALAAAAHEGSVFPVFIWCPEEEGQFYPGRASRWWMKQSLAHLSQSLKALGSDLTLIKTHNTISAILDCIRVTGATKVVFNHLYDPVSLVRDHTVKEKLVERGISVQSYNGDLLYEPWEIYCEKGKPFTSFNSYWKKCLDMSIESVMLPPPWRLMPITAAAEAIWACSIEELGLENEAEKPSNALLTRAWSPGWSNADKLLNEFIEKQLIDYAKNSKKVVGNSTSLLSPYLHFGEISVRHVFQCARMKQIIWARDKNSEGEESADLFLRGIGLREYSRYICFNFPFTHEQSLLSHLRFFPWDADVDKFKAWRQGRTGYPLVDAGMRELWATGWMHNRIRVIVSSFAVKFLLLPWKWGMKYFWDTLLDADLECDILGWQYISGSIPDGHELDRLDNPALQGAKYDPEGEYIRQWLPELARLPTEWIHHPWDAPLTVLKASGVELGTNYAKPIVDIDTARELLAKAISRTRGAQIMIGAAAMVSKGEEDNMAIIKEFMRFKVHMEGSVNGHEFEIEGEGEGRPYEGTQTAKLKVTKGGPLPFAWDILSPQFMYGSKAYVKHPADIPDYLKLSFPEGFKWERVMNFEDGGVVTVTQDSSLQDGEFIYKVKLRGTNFPSDGPVMQKKTMGWEASSERMYPEDGALKGEIKQRLKLKDGGHYDAEVKTTYKAKKPVQLPGAYNVNIKLDITSHNEDYTIVEQYERAEGRHSTGGMDELYK

SEQ ID NO: 47 - protein, 291 aa, Artificial Sequence
  synthetic construct
MDVFMKGLSKAKEGVVAAAEKTKQGVAEAAGKTKEGVLYVGSKTKEGVVHGVATVAEKTKEQVTNVGGAVVTGVTAVAQKTVEGAGSIAAATGFVKKDQLGKNEEGAPQEGILEDMPVDPDNEAYEMPSEEGYQDYEPEAFHTLYAPGGYDIMGWLIQIMNRPNPQVELGPVDTSCALILCDLKQKDTPIVYASEAFLYMTGYSNAEVLGRNCRFLQSPDGMVKPKSTRKYVDSNTINTMRKAIDRNAEVQVEVVNFKKNGQRFVNFLTMIPVRDETGEYRYSMGFQCETE

SEQ ID NO: 48 - protein, 292 aa, Artificial Sequence
  synthetic construct
MHTLYAPGGYDIMGWLIQIMNRPNPQVELGPVDTSCALILCDLKQKDTPIVYASEAFLYMTGYSNAEVLGRNCRFLQSPDGMVKPKSTRKYVDSNTINTMRKAIDRNAEVQVEVVNFKKNGQRFVNFLTMIPVRDETGEYRYSMGFQCETEAMDVFMKGLSKAKEGVVAAAEKTKQGVAEAAGKTKEGVLYVGSKTKEGVVHGVATVAEKTKEQVTNVGGAVVTGVTAVAQKTVEGAGSIAAATGFVKKDQLGKNEEGAPQEGILEDMPVDPDNEAYEMPSEEGYQDYEPEA

SEQ ID NO: 49 - protein, 528 aa, Artificial Sequence
  synthetic construct
MVSKGEEDNMAIIKEFMRFKVHMEGSVNGHEFEIEGEGEGRPYEGTQTAKLKVTKGGPLPFAWDILSPQFMYGSKAYVKHPADIPDYLKLSFPEGFKWERVMNFEDGGVVTVTQDSSLQDGEFIYKVKLRGTNFPSDGPVMQKKTMGWEASSERMYPEDGALKGEIKQRLKLKDGGHYDAEVKTTYKAKKPVQLPGAYNVNIKLDITSHNEDYTIVEQYERAEGRHSTGGMDELYSKMDVFMKGLSKAKEGVVAAAEKTKQGVAEAAGKTKEGVLYVGSKTKEGVVHGVATVAEKTKEQVTNVGGAVVTGVTAVAQKTVEGAGSIAAATGFVKKDQLGKNEEGAPQEGILEDMPVDPDNEAYEMPSEEGYQDYEPEAFHTLYAPGGYDIMGWLIQIMNRPNPQVELGPVDTSCALILCDLKQKDTPIVYASEAFLYMTGYSNAEVLGRNCRFLQSPDGMVKPKSTRKYVDSNTINTMRKAIDRNAEVQVEVVNFKKNGQRFVNFLTMIPVRDETGEYRYSMGFQCETE

SEQ ID NO: 50 - protein, 547 aa, Artificial Sequence
  synthetic construct
MVSKGEEDNMAIIKEFMRFKVHMEGSVNGHEFEIEGEGEGRPYEGTQTAKLKVTKGGPLPFAWDILSPQFMYGSKAYVKHPADIPDYLKLSFPEGFKWERVMNFEDGGVVTVTQDSSLQDGEFIYKVKLRGTNFPSDGPVMQKKTMGWEASSERMYPEDGALKGEIKQRLKLKDGGHYDAEVKTTYKAKKPVQLPGAYNVNIKLDITSHNEDYTIVEQYERAEGRHSTGGMDELYKSGLRSRAQRHTLYAPGGYDIMGWLIQIMNRPNPQVELGPVDTSCALILCDLKQKDTPIVYASEAFLYMTGYSNAEVLGRNCRFLQSPDGMVKPKSTRKYVDSNTINTMRKAIDRNAEVQVEVVNFKKNGQRFVNFLTMIPVRDETGEYRYSMGFQCETEALEFCSRRYRGPMDVFMKGLSKAKEGVVAAAEKTKQGVAEAAGKTKEGVLYVGSKTKEGVVHGVATVAEKTKEQVTNVGGAVVTGVTAVAQKTVEGAGSIAAATGFVKKDQLGKNEEGAPQEGILEDMPVDPDNEAYEMPSEEGYQDYEPEA

SEQ ID NO: 51 - protein, 534 aa, Artificial Sequence
  synthetic construct
MHTLYAPGGYDIMGWLIQIMNRPNPQVELGPVDTSCALILCDLKQKDTPIVYASEAFLYMTGYSNAEVLGRNCRFLQSPDGMVKPKSTRKYVDSNTINTMRKAIDRNAEVQVEVVNFKKNGQRFVNFLTMIPVRDETGEYRYSMGFQCETEAMDVFMKGLSKAKEGVVAAAEKTKQGVAEAAGKTKEGVLYVGSKTKEGVVHGVATVAEKTKEQVTNVGGAVVTGVTAVAQKTVEGAGSIAAATGFVKKDQLGKNEEGAPQEGILEDMPVDPDNEAYEMPSEEGYQDYEPEAFAPVATMVSKGEEDNMAIIKEFMRFKVHMEGSVNGHEFEIEGEGEGRPYEGTQTAKLKVTKGGPLPFAWDILSPQFMYGSKAYVKHPADIPDYLKLSFPEGFKWERVMNFEDGGVVTVTQDSSLQDGEFIYKVKLRGTNFPSDGPVMQKKTMGWEASSERMYPEDGALKGEIKQRLKLKDGGHYDAEVKTTYKAKKPVQLPGAYNVNIKLDITSHNEDYTIVEQYERAEGRHSTGGMDELYK

SEQ ID NO: 52 - protein, 558 aa, Artificial Sequence
  synthetic construct
MDVFMKGLSKAKEGVVAAAEKTKQGVAEAAGKTKEGVLYVGSKTKEGVVHGVATVAEKTKEQVTNVGGAVVTGVTAVAQKTVEGAGSIAAATGFVKKDQLGKNEEGAPQEGILEDMPVDPDNEAYEMPSEEGYQDYEPEALLPVATMVSKGEEDNMAIIKEFMRFKVHMEGSVNGHEFEIEGEGEGRPYEGTQTAKLKVTKGGPLPFAWDILSPQFMYGSKAYVKHPADIPDYLKLSFPEGFKWERVMNFEDGGVVTVTQDSSLQDGEFIYKVKLRGTNFPSDGPVMQKKTMGWEASSERMYPEDGALKGEIKQRLKLKDGGHYDAEVKTTYKAKKPVQLPGAYNVNIKLDITSHNEDYTIVEQYERAEGRHSTGGMDELYKSGLRSRAQASNSAVDGTAGPMHTLYAPGGYDIMGYLIQIMNRPNPQVELGPVDTSCALILCDLKQKDTPIVYASEAFLYMTGYSNAEVLGRNCRFLQSPDGMVKPKSTRKYVDSNTINTMRKAIDRNAEVQVEVVNFKKNGQRFVNFLTMIPVRDETGEYRYSMGFQCETEGIHRI

SEQ ID NO: 53 - protein, 551 aa, Artificial Sequence
  synthetic construct
MVSKGEEDNMAIIKEFMRFKVHMEGSVNGHEFEIEGEGEGRPYEGTQTAKLKVTKGGPLPFAWDILSPQFMYGSKAYVKHPADIPDYLKLSFPEGFKWERVMNFEDGGVVTVTQDSSLQDGEFIYKVKLRGTNFPSDGPVMQKKTMGWEASSERMYPEDGALKGEIKQRLKLKDGGHYDAEVKTTYKAKKPVQLPGAYNVNIKLDITSHNEDYTIVEQYERAEGRHSTGGMDELYKSGLRSRAQMDVFMKGLSKAKEGVVAAAEKTKQGVAEAAGKTKEGVLYVGSKTKEGVVHGVATVAEKTKEQVTNVGGAVVTGVTAVAQKTVEGAGSIAAATGFVKKDQLGKNEEGAPQEGILEDMPVDPDNEAYEMPSEEGYQDYEPEASNSAVDGTAGPMHTLYAPGGYDIMGYLIQIMNRPNPQVELGPVDTSCALILCDLKQKDTPIVYASEAFLYMTGYSNAEVLGRNCRFLQSPDGMVKPKSTRKYVDSNTINTMRKAIDRNAEVQVEVVNFKKNGQRFVNFLTMIPVRDETGEYRYSMGFQCETEGIHRI

SEQ ID NO: 54 - protein, 551 aa, Artificial Sequence
  synthetic construct
MVSKGEEDNMAIIKEFMRFKVHMEGSVNGHEFEIEGEGEGRPYEGTQTAKLKVTKGGPLPFAWDILSPQFMYGSKAYVKHPADIPDYLKLSFPEGFKWERVMNFEDGGVVTVTQDSSLQDGEFIYKVKLRGTNFPSDGPVMQKKTMGWEASSERMYPEDGALKGEIKQRLKLKDGGHYDAEVKTTYKAKKPVQLPGAYNVNIKLDITSHNEDYTIVEQYERAEGRHSTGGMDELYKSGLRSRAQASNSAVDGTAGPMHTLYAPGGYDIMGYLIQIMNRPNPQVELGPVDTSCALILCDLKQKDTPIVYASEAFLYMTGYSNAEVLGRNCRFLQSPDGMVKPKSTRKYVDSNTINTMRKAIDRNAEVQVEVVNFKKNGQRFVNFLTMIPVRDETGEYRYSMGFQCETEGMDVFMKGLSKAKEGVVAAAEKTKQGVAEAAGKTKEGVLYVGSKTKEGVVHGVATVAEKTKEQVTNVGGAVVTGVTAVAQKTVEGAGSIAAATGFVKKDQLGKNEEGAPQEGILEDMPVDPDNEAYEMPSEEGYQDYEPEAHRI

SEQ ID NO: 55 - protein, 702 aa, Artificial Sequence
  synthetic construct
MVSKGEEDNMAIIKEFMRFKVHMEGSVNGHEFEIEGEGEGRPYEGTQTAKLKVTKGGPLPFAWDILSPQFMYGSKAYVKHPADIPDYLKLSFPEGFKWERVMNFEDGGVVTVTQDSSLQDGEFIYKVKLRGTNFPSDGPVMQKKTMGWEASSERMYPEDGALKGEIKQRLKLKDGGHYDAEVKTTYKAKKPVQLPGAYNVNIKLDITSHNEDYTIVEQYERAEGRHSTGGMDELYKSGLRSRAQASNSAVDGTAGPMAEPRQEFEVMEDHAGTYGLGDRKDQGGYTMHQDQEGDTDAGLKESPLQTPTEDGSEEPGSETSDAKSTPTAEDVTAPLVDEGAPGKQAAAQPHTEIPEGTTAEEAGIGDTPSLEDEAAGHVTQARMVSKSKDGTGSDDKKAKGADGKTKIATPRGAAPPGQKGQANATRIPAKTPPAPKTPPSSGEPPKSGDRSGYSSPGSPGTPGSRSRTPSLPTPPTREPKKVAVVRTPPKSPSSAKSRLQTAPVPMPDLKNVKSKIGSTENLKHQPGGGKVQIINKKLDLSNVQSKCGSKDNIKHVPGGGSVQIVYKPVDLSKVTSKCGSLGNIHHKPGGGQVEVKSEKLDFKDRVQSKIGSLDNITHVPGGGNKKIETHKLTFRENAKAKTDHGAEIVYKSPVVSGDTSPRHLSNVSSTGSIDMVDSPQLATLADEVSASLAKQGLGIHRI

SEQ ID NO: 56 - protein, 879 aa, Artificial Sequence
  synthetic construct
MVSKGEEDNMAIIKEFMRFKVHMEGSVNGHEFEIEGEGEGRPYEGTQTAKLKVTKGGPLPFAWDILSPQFMYGSKAYVKHPADIPDYLKLSFPEGFKWERVMNFEDGGVVTVTQDSSLQDGEFIYKVKLRGTNFPSDGPVMQKKTMGWEASSERMYPEDGALKGEIKQRLKLKDGGHYDAEVKTTYKAKKPVQLPGAYNVNIKLDITSHNEDYTIVEQYERAEGRHSTGGMDELYKSGLRSRAQASNSAVDGTAGPMPDYSLVKALQMAQQNFVITDASLPDNPIVYASRGFLTLTGYSLDQILGRNCRFLQGPETDPRAVDKIRNAITKGVDTSVCLLNYRQDGTTFWNLFFVAGLRDSKGNIVNYVGVQSKVSEDYAKLLVNEQNIEYKGVRTSNMLRRKPGGIHRIMAEPRQEFEVMEDHAGTYGLGDRKDQGGYTMHQDQEGDTDAGLKESPLQTPTEDGSEEPGSETSDAKSTPTAEDVTAPLVDEGAPGKQAAAQPHTEIPEGTTAEEAGIGDTPSLEDEAAGHVTQARMVSKSKDGTGSDDKKAKGADGKTKIATPRGAAPPGQKGQANATRIPAKTPPAPKTPPSSGEPPKSGDRSGYSSPGSPGTPGSRSRTPSLPTPPTREPKKVAVVRTPPKSPSSAKSRLQTAPVPMPDLKNVKSKIGSTENLKHQPGGGKVQIINKKLDLSNVQSKCGSKDNIKHVPGGGSVQIVYKPVDLSKVTSKCGSLGNIHHKPGGGQVEVKSEKLDFKDRVQSKIGSLDNITHVPGGGNKKIETHKLTFRENAKAKTDHGAEIVYKSPVVSGDTSPRHLSNVSSTGSIDMVDSPQLATLADEVSASLAKQGLITDHNQPYHICRGFTCFKKPPTPPPEPET

SEQ ID NO: 57 - protein, 852 aa, Artificial Sequence
  synthetic construct
MVSKGEEDNMAIIKEFMRFKVHMEGSVNGHEFEIEGEGEGRPYEGTQTAKLKVTKGGPLPFAWDILSPQFMYGSKAYVKHPADIPDYLKLSFPEGFKWERVMNFEDGGVVTVTQDSSLQDGEFIYKVKLRGTNFPSDGPVMQKKTMGWEASSERMYPEDGALKGEIKQRLKLKDGGHYDAEVKTTYKAKKPVQLPGAYNVNIKLDITSHNEDYTIVEQYERAEGRHSTGGMDELYKSGLRSRAQASNSAVDGTAGPMHTLYAPGGYDIMGWLIQIMNRPNPQVELGPVDTSCALILCDLKQKDTPIVYASEAFLYMTGYSNAEVLGRNCRFLQSPDGMVKPKSTRKYVDSNTINTMRKAIDRNAEVQVEVVNFKKNGQRFVNFLTMIPVRDETGEYRYSMGFQCETEGMAEPRQEFEVMEDHAGTYGLGDRKDQGGYTMHQDQEGDTDAGLKESPLQTPTEDGSEEPGSETSDAKSTPTAEDVTAPLVDEGAPGKQAAAQPHTEIPEGTTAEEAGIGDTPSLEDEAAGHVTQARMVSKSKDGTGSDDKKAKGADGKTKIATPRGAAPPGQKGQANATRIPAKTPPAPKTPPSSGEPPKSGDRSGYSSPGSPGTPGSRSRTPSLPTPPTREPKKVAVVRTPPKSPSSAKSRLQTAPVPMPDLKNVKSKIGSTENLKHQPGGGKVQIINKKLDLSNVQSKCGSKDNIKHVPGGGSVQIVYKPVDLSKVTSKCGSLGNIHHKPGGGQVEVKSEKLDFKDRVQSKIGSLDNITHVPGGGNKKIETHKLTFRENAKAKTDHGAEIVYKSPVVSGDTSPRHLSNVSSTGSIDMVDSPQLATLADEVSASLAKQGLHRI

SEQ ID NO: 58 - protein, 853 aa, Artificial Sequence
  synthetic construct
MVSKGEEDNMAIIKEFMRFKVHMEGSVNGHEFEIEGEGEGRPYEGTQTAKLKVTKGGPLPFAWDILSPQFMYGSKAYVKHPADIPDYLKLSFPEGFKWERVMNFEDGGVVTVTQDSSLQDGEFIYKVKLRGTNFPSDGPVMQKKTMGWEASSERMYPEDGALKGEIKQRLKLKDGGHYDAEVKTTYKAKKPVQLPGAYNVNIKLDITSHNEDYTIVEQYERAEGRHSTGGMDELYKSGLTMAEPRQEFEVMEDHAGTYGLGDRKDQGGYTMHQDQEGDTDAGLKESPLQTPTEDGSEEPGSETSDAKSTPTAEDVTAPLVDEGAPGKQAAAQPHTEIPEGTTAEEAGIGDTPSLEDEAAGHVTQARMVSKSKDGTGSDDKKAKGADGKTKIATPRGAAPPGQKGQANATRIPAKTPPAPKTPPSSGEPPKSGDRSGYSSPGSPGTPGSRSRTPSLPTPPTREPKKVAVVRTPPKSPSSAKSRLQTAPVPMPDLKNVKSKIGSTENLKHQPGGGKVQIINKKLDLSNVQSKCGSKDNIKHVPGGGSVQIVYKPVDLSKVTSKCGSLGNIHHKPGGGQVEVKSEKLDFKDRVQSKIGSLDNITHVPGGGNKKIETHKLTFRENAKAKTDHGAEIVYKSPVVSGDTSPRHLSNVSSTGSIDMVDSPQLATLADEVSASLAKQGLRRAQRHTLYAPGGYDIMGWLIQIMNRPNPQVELGPVDTSCALILCDLKQKDTPIVYASEAFLYMTGYSNAEVLGRNCRFLQSPDGMVKPKSTRKYVDSNTINTMRKAIDRNAEVQVEVVNFKKNGQRFVNFLTMIPVRDETGEYRYSMGFQCETEALEFCSRRYRGPGIHRI

SEQ ID NO: 59 - protein, 853 aa, Artificial Sequence
  synthetic construct
MVSKGEEDNMAIIKEFMRFKVHMEGSVNGHEFEIEGEGEGRPYEGTQTAKLKVTKGGPLPFAWDILSPQFMYGSKAYVKHPADIPDYLKLSFPEGFKWERVMNFEDGGVVTVTQDSSLQDGEFIYKVKLRGTNFPSDGPVMQKKTMGWEASSERMYPEDGALKGEIKQRLKLKDGGHYDAEVKTTYKAKKPVQLPGAYNVNIKLDITSHNEDYTIVEQYERAEGRHSTGGMDELYKSGLRSRAQRHTLYAPGGYDIMGWLIQIMNRPNPQVELGPVDTSCALILCDLKQKDTPIVYASEAFLYMTGYSNAEVLGRNCRFLQSPDGMVKPKSTRKYVDSNTINTMRKAIDRNAEVQVEVVNFKKNGQRFVNFLTMIPVRDETGEYRYSMGFQCETEALAMAEPRQEFEVMEDHAGTYGLGDRKDQGGYTMHQDQEGDTDAGLKESPLQTPTEDGSEEPGSETSDAKSTPTAEDVTAPLVDEGAPGKQAAAQPHTEIPEGTTAEEAGIGDTPSLEDEAAGHVTQARMVSKSKDGTGSDDKKAKGADGKTKIATPRGAAPPGQKGQANATRIPAKTPPAPKTPPSSGEPPKSGDRSGYSSPGSPGTPGSRSRTPSLPTPPTREPKKVAVVRTPPKSPSSAKSRLQTAPVPMPDLKNVKSKIGSTENLKHQPGGGKVQIINKKLDLSNVQSKCGSKDNIKHVPGGGSVQIVYKPVDLSKVTSKCGSLGNIHHKPGGGQVEVKSEKLDFKDRVQSKIGSLDNITHVPGGGNKKIETHKLTFRENAKAKTDHGAEIVYKSPVVSGDTSPRHLSNVSSTGSIDMVDSPQLATLADEVSASLAKQGLRCSRRYRGPGIHRI

SEQ ID NO: 60 - protein, 859 aa, Artificial Sequence
  synthetic construct
MAEPRQEFEVMEDHAGTYGLGDRKDQGGYTMHQDQEGDTDAGLKESPLQTPTEDGSEEPGSETSDAKSTPTAEDVTAPLVDEGAPGKQAAAQPHTEIPEGTTAEEAGIGDTPSLEDEAAGHVTQARMVSKSKDGTGSDDKKAKGADGKTKIATPRGAAPPGQKGQANATRIPAKTPPAPKTPPSSGEPPKSGDRSGYSSPGSPGTPGSRSRTPSLPTPPTREPKKVAVVRTPPKSPSSAKSRLQTAPVPMPDLKNVKSKIGSTENLKHQPGGGKVQIINKKLDLSNVQSKCGSKDNIKHVPGGGSVQIVYKPVDLSKVTSKCGSLGNIHHKPGGGQVEVKSEKLDFKDRVQSKIGSLDNITHVPGGGNKKIETHKLTFRENAKAKTDHGAEIVYKSPVVSGDTSPRHLSNVSSTGSIDMVDSPQLATLADEVSASLAKQGLALPVATMVSKGEEDNMAIIKEFMRFKVHMEGSVNGHEFEIEGEGEGRPYEGTQTAKLKVTKGGPLPFAWDILSPQFMYGSKAYVKHPADIPDYLKLSFPEGFKWERVMNFEDGGVVTVTQDSSLQDGEFIYKVKLRGTNFPSDGPVMQKKTMGWEASSERMYPEDGALKGEIKQRLKLKDGGHYDAEVKTTYKAKKPVQLPGAYNVNIKLDITSHNEDYTIVEQYERAEGRHSTGGMDELYKSGLRSRAQRHTLYAPGGYDIMGWLIQIMNRPNPQVELGPVDTSCALILCDLKQKDTPIVYASEAFLYMTGYSNAEVLGRNCRFLQSPDGMVKPKSTRKYVDSNTINTMRKAIDRNAEVQVEVVNFKKNGQRFVNFLTMIPVRDETGEYRYSMGFQCETEALEFCSRRYRGPGIHRI

SEQ ID NO: 61 - protein, 1190 aa, Artificial Sequence
  synthetic construct
MKMDKKTIVWFRRDLRIEDNPALAAAAHEGSVFPVFIWCPEEEGQFYPGRASRWWMKQSLAHLSQSLKALGSDLTLIKTHNTISAILDCIRVTGATKVVFNHLYDPVSLVRDHTVKEKLVERGISVQSYNGDLLYEPWEIYCEKGKPFTSFNSYWKKCLDMSIESVMLPPPWRLMPITAAAEAIWACSIEELGLENEAEKPSNALLTRAWSPGWSNADKLLNEFIEKQLIDYAKNSKKVVGNSTSLLSPYLHFGEISVRHVFQCARMKQIIWARDKNSEGEESADLFLRGIGLREYSRYICFNFPFTHEQSLLSHLRFFPWDADVDKFKAWRQGRTGYPLVDAGMRELWATGWMHNRIRVIVSSFAVKFLLLPWKWGMKYFWDTLLDADLECDILGWQYISGSIPDGHELDRLDNPALQGAKYDPEGEYIRQWLPELARLPTEWIHHPWDAPLTVLKASGVELGTNYAKPIVDIDTARELLAKAISRTRGAQIMIGAAARDPPVATMVSKGEEDNMAIIKEFMRFKVHMEGSVNGHEFEIEGEGEGRPYEGTQTAKLKVTKGGPLPFAWDILSPQFMYGSKAYVKHPADIPDYLKLSFPEGFKWERVMNFEDGGVVTVTQDSSLQDGEFIYKVKLRGTNFPSDGPVMQKKTMGWEASSERMYPEDGALKGEIKQRLKLKDGGHYDAEVKTTYKAKKPVQLPGAYNVNIKLDITSHNEDYTIVEQYERAEGRHSTGGMDELYKSRMAEPRQEFEVMEDHAGTYGLGDRKDQGGYTMHQDQEGDTDAGLKESPLQTPTEDGSEEPGSETSDAKSTPTAEDVTAPLVDEGAPGKQAAAQPHTEIPEGTTAEEAGIGDTPSLEDEAAGHVTQARMVSKSKDGTGSDDKKAKGADGKTKIATPRGAAPPGQKGQANATRIPAKTPPAPKTPPSSGEPPKSGDRSGYSSPGSPGTPGSRSRTPSLPTPPTREPKKVAVVRTPPKSPSSAKSRLQTAPVPMPDLKNVKSKIGSTENLKHQPGGGKVQIINKKLDLSNVQSKCGSKDNIKHVPGGGSVQIVYKPVDLSKVTSKCGSLGNIHHKPGGGQVEVKSEKLDFKDRVQSKIGSLDNITHVPGGGNKKIETHKLTFRENAKAKTDHGAEIVYKSPVVSGDTSPRHLSNVSSTGSIDMVDSPQLATLADEVSASLAKQGLGDSRS

SEQ ID NO: 62 - protein, 706 aa, Artificial Sequence
  synthetic construct
MAEPRQEFEVMEDHAGTYGLGDRKDQGGYTMHQDQEGDTDAGLKESPLQTPTEDGSEEPGSETSDAKSTPTAEDVTAPLVDEGAPGKQAAAQPHTEIPEGTTAEEAGIGDTPSLEDEAAGHVTQARMVSKSKDGTGSDDKKAKGADGKTKIATPRGAAPPGQKGQANATRIPAKTPPAPKTPPSSGEPPKSGDRSGYSSPGSPGTPGSRSRTPSLPTPPTREPKKVAVVRTPPKSPSSAKSRLQTAPVPMPDLKNVKSKIGSTENLKHQPGGGKVQIINKKLDLSNVQSKCGSKDNIKHVPGGGSVQIVYKPVDLSKVTSKCGSLGNIHHKPGGGQVEVKSEKLDFKDRVQSKIGSLDNITHVPGGGNKKIETHKLTFRENAKAKTDHGAEIVYKSPVVSGDTSPRHLSNVSSTGSIDMVDSPQLATLADEVSASLAKQGLFATMVSKGEEDNMAIIKEFMRFKVHMEGSVNGHEFEIEGEGEGRPYEGTQTAKLKVTKGGPLPFAWDILSPQFMYGSKAYVKHPADIPDYLKLSFPEGFKWERVMNFEDGGVVTVTQDSSLQDGEFIYKVKLRGTNFPSDGPVMQKKTMGWEASSERMYPEDGALKGEIKQRLKLKDGGHYDAEVKTTYKAKKPVQLPGAYNVNIKLDITSHNEDYTIVEQYERAEGRHSTGGMDELYKSGLRSRAQASNSAVDGTAGPGSTGSR

SEQ ID NO: 63 - protein, 1193 aa, Artificial Sequence
  synthetic construct
MAEPRQEFEVMEDHAGTYGLGDRKDQGGYTMHQDQEGDTDAGLKESPLQTPTEDGSEEPGSETSDAKSTPTAEDVTAPLVDEGAPGKQAAAQPHTEIPEGTTAEEAGIGDTPSLEDEAAGHVTQARMVSKSKDGTGSDDKKAKGADGKTKIATPRGAAPPGQKGQANATRIPAKTPPAPKTPPSSGEPPKSGDRSGYSSPGSPGTPGSRSRTPSLPTPPTREPKKVAVVRTPPKSPSSAKSRLQTAPVPMPDLKNVKSKIGSTENLKHQPGGGKVQIINKKLDLSNVQSKCGSKDNIKHVPGGGSVQIVYKPVDLSKVTSKCGSLGNIHHKPGGGQVEVKSEKLDFKDRVQSKIGSLDNITHVPGGGNKKIETHKLTFRENAKAKTDHGAEIVYKSPVVSGDTSPRHLSNVSSTGSIDMVDSPQLATLADEVSASLAKQGLALPDSDLEATMKMDKKTIVWFRRDLRIEDNPALAAAAHEGSVFPVFIWCPEEEGQFYPGRASRWWMKQSLAHLSQSLKALGSDLTLIKTHNTISAILDCIRVTGATKVVFNHLYDPVSLVRDHTVKEKLVERGISVQSYNGDLLYEPWEIYCEKGKPFTSFNSYWKKCLDMSIESVMLPPPWRLMPITAAAEAIWACSIEELGLENEAEKPSNALLTRAWSPGWSNADKLLNEFIEKQLIDYAKNSKKVVGNSTSLLSPYLHFGEISVRHVFQCARMKQIIWARDKNSEGEESADLFLRGIGLREYSRYICFNFPFTHEQSLLSHLRFFPWDADVDKFKAWRQGRTGYPLVDAGMRELWATGWMHNRIRVIVSSFAVKFLLLPWKWGMKYFWDTLLDADLECDILGWQYISGSIPDGHELDRLDNPALQGAKYDPEGEYIRQWLPELARLPTEWIHHPWDAPLTVLKASGVELGTNYAKPIVDIDTARELLAKAISRTRGAQIMIGAAARDPPVATMVSKGEEDNMAIIKEFMRFKVHMEGSVNGHEFEIEGEGEGRPYEGTQTAKLKVTKGGPLPFAWDILSPQFMYGSKAYVKHPADIPDYLKLSFPEGFKWERVMNFEDGGVVTVTQDSSLQDGEFIYKVKLRGTNFPSDGPVMQKKTMGWEASSERMYPEDGALKGEIKQRLKLKDGGHYDAEVKTTYKAKKPVQLPGAYNVNIKLDITSHNEDYTIVEQYERAEGRHSTGGMDELYK

SEQ ID NO: 64 - protein, 1184 aa, Artificial Sequence
  synthetic construct
MKMDKKTIVWFRRDLRIEDNPALAAAAHEGSVFPVFIWCPEEEGQFYPGRASRWWMKQSLAHLSQSLKALGSDLTLIKTHNTISAILDCIRVTGATKVVFNHLYDPVSLVRDHTVKEKLVERGISVQSYNGDLLYEPWEIYCEKGKPFTSFNSYWKKCLDMSIESVMLPPPWRLMPITAAAEAIWACSIEELGLENEAEKPSNALLTRAWSPGWSNADKLLNEFIEKQLIDYAKNSKKVVGNSTSLLSPYLHFGEISVRHVFQCARMKQIIWARDKNSEGEESADLFLRGIGLREYSRYICFNFPFTHEQSLLSHLRFFPWDADVDKFKAWRQGRTGYPLVDAGMRELWATGWMHNRIRVIVSSFAVKFLLLPWKWGMKYFWDTLLDADLECDILGWQYISGSIPDGHELDRLDNPALQGAKYDPEGEYIRQWLPELARLPTEWIHHPWDAPLTVLKASGVELGTNYAKPIVDIDTARELLAKAISRTRGAQIMIGAAAPMAEPRQEFEVMEDHAGTYGLGDRKDQGGYTMHQDQEGDTDAGLKESPLQTPTEDGSEEPGSETSDAKSTPTAEDVTAPLVDEGAPGKQAAAQPHTEIPEGTTAEEAGIGDTPSLEDEAAGHVTQARMVSKSKDGTGSDDKKAKGADGKTKIATPRGAAPPGQKGQANATRIPAKTPPAPKTPPSSGEPPKSGDRSGYSSPGSPGTPGSRSRTPSLPTPPTREPKKVAVVRTPPKSPSSAKSRLQTAPVPMPDLKNVKSKIGSTENLKHQPGGGKVQIINKKLDLSNVQSKCGSKDNIKHVPGGGSVQIVYKPVDLSKVTSKCGSLGNIHHKPGGGQVEVKSEKLDFKDRVQSKIGSLDNITHVPGGGNKKIETHKLTFRENAKAKTDHGAEIVYKSPVVSGDTSPRHLSNVSSTGSIDMVDSPQLATLADEVSASLAKQGLGDPPVATMVSKGEEDNMAIIKEFMRFKVHMEGSVNGHEFEIEGEGEGRPYEGTQTAKLKVTKGGPLPFAWDILSPQFMYGSKAYVKHPADIPDYLKLSFPEGFKWERVMNFEDGGVVTVTQDSSLQDGEFIYKVKLRGTNFPSDGPVMQKKTMGWEASSERMYPEDGALKGEIKQRLKLKDGGHYDAEVKTTYKAKKPVQLPGAYNVNIKLDITSHNEDYTIVEQYERAEGRHSTGGMDELYK

SEQ ID NO: 65 - protein, 1190 aa, Artificial Sequence; identical to SEQ ID NO: 61
  synthetic construct

SEQ ID NO: 66 - protein, 853 aa, Artificial Sequence; identical to SEQ ID NO: 58
  synthetic construct

SEQ ID NO: 67 - protein, 853 aa, Artificial Sequence; identical to SEQ ID NO: 59
  synthetic construct

SEQ ID NO: 68 - protein, 971 aa, Artificial Sequence
  synthetic construct
MKMDKKTIVWFRRDLRIEDNPALAAAAHEGSVFPVFIWCPEEEGQFYPGRASRWWMKQSLAHLSQSLKALGSDLTLIKTHNTISAILDCIRVTGATKVVFNHLYDPVSLVRDHTVKEKLVERGISVQSYNGDLLYEPWEIYCEKGKPFTSFNSYWKKCLDMSIESVMLPPPWRLMPITAAAEAIWACSIEELGLENEAEKPSNALLTRAWSPGWSNADKLLNEFIEKQLIDYAKNSKKVVGNSTSLLSPYLHFGEISVRHVFQCARMKQIIWARDKNSEGEESADLFLRGIGLREYSRYICFNFPFTHEQSLLSHLRFFPWDADVDKFKAWRQGRTGYPLVDAGMRELWATGWMHNRIRVIVSSFAVKFLLLPWKWGMKYFWDTLLDADLECDILGWQYISGSIPDGHELDRLDNPALQGAKYDPEGEYIRQWLPELARLPTEWIHHPWDAPLTVLKASGVELGTNYAKPIVDIDTARELLAKAISRTRGAQIMIGAAAQMAEPRQEFEVMEDHAGTYGLGDRKDQGGYTMHQDQEGDTDAGLKESPLQTPTEDGSEEPGSETSDAKSTPTAEDVTAPLVDEGAPGKQAAAQPHTEIPEGTTAEEAGIGDTPSLEDEAAGHVTQARMVSKSKDGTGSDDKKAKGADGKTKIATPRGAAPPGQKGQANATRIPAKTPPAPKTPPSSGEPPKSGDRSGYSSPGSPGTPGSRSRTPSLPTPPTREPKKVAVVRTPPKSPSSAKSRLQTAPVPMPDLKNVKSKIGSTENLKHQPGGGKVQIINKKLDLSNVQSKCGSKDNIKHVPGGGSVQIVYKPVDLSKVTSKCGSLGNIHHKPGGGQVEVKSEKLDFKDRVQSKIGSLDNITHVPGGGNKKIETHKLTFRENAKAKTDHGAEIVYKSPVVSGDTSPRHLSNVSSTGSIDMVDSPQLATLADEVSASLAKQGLATLDHNQPYHICRGFTCFKKPPTPPPEPET

SEQ ID NO: 69 - protein, 583 aa, Artificial Sequence
  synthetic construct
MHTLYAPGGYDIMGWLIQIMNRPNPQVELGPVDTSCALILCDLKQKDTPIVYASEAFLYMTGYSNAEVLGRNCRFLQSPDGMVKPKSTRKYVDSNTINTMRKAIDRNAEVQVEVVNFKKNGQRFVNFLTMIPVRDETGEMAEPRQEFEVMEDHAGTYGLGDRKDQGGYTMHQDQEGDTDAGLKESPLQTPTEDGSEEPGSETSDAKSTPTAEDVTAPLVDEGAPGKQAAAQPHTEIPEGTTAEEAGIGDTPSLEDEAAGHVTQARMVSKSKDGTGSDDKKAKGADGKTKIATPRGAAPPGQKGQANATRIPAKTPPAPKTPPSSGEPPKSGDRSGYSSPGSPGTPGSRSRTPSLPTPPTREPKKVAVVRTPPKSPSSAKSRLQTAPVPMPDLKNVKSKIGSTENLKHQPGGGKVQIINKKLDLSNVQSKCGSKDNIKHVPGGGSVQIVYKPVDLSKVTSKCGSLGNIHHKPGGGQVEVKSEKLDFKDRVQSKIGSLDNITHVPGGGNKKIETHKLTFRENAKAKTDHGAEIVYKSPVVSGDTSPRHLSNVSSTGSIDMVDSPQLATLADEVSASLAKQGLHRI

SEQ ID NO: 70 - protein, 969 aa, Artificial Sequence
  synthetic construct
MAEPRQEFEVMEDHAGTYGLGDRKDQGGYTMHQDQEGDTDAGLKESPLQTPTEDGSEEPGSETSDAKSTPTAEDVTAPLVDEGAPGKQAAAQPHTEIPEGTTAEEAGIGDTPSLEDEAAGHVTQARMVSKSKDGTGSDDKKAKGADGKTKIATPRGAAPPGQKGQANATRIPAKTPPAPKTPPSSGEPPKSGDRSGYSSPGSPGTPGSRSRTPSLPTPPTREPKKVAVVRTPPKSPSSAKSRLQTAPVPMPDLKNVKSKIGSTENLKHQPGGGKVQIINKKLDLSNVQSKCGSKDNIKHVPGGGSVQIVYKPVDLSKVTSKCGSLGNIHHKPGGGQVEVKSEKLDFKDRVQSKIGSLDNITHVPGGGNKKIETHKLTFRENAKAKTDHGAEIVYKSPVVSGDTSPRHLSNVSSTGSIDMVDSPQLATLADEVSASLAKQGLMKMDKKTIVWFRRDLRIEDNPALAAAAHEGSVFPVFIWCPEEEGQFYPGRASRWWMKQSLAHLSQSLKALGSDLTLIKTHNTISAILDCIRVTGATKVVFNHLYDPVSLVRDHTVKEKLVERGISVQSYNGDLLYEPWEIYCEKGKPFTSFNSYWKKCLDMSIESVMLPPPWRLMPITAAAEAIWACSIEELGLENEAEKPSNALLTRAWSPGWSNADKLLNEFIEKQLIDYAKNSKKVVGNSTSLLSPYLHFGEISVRHVFQCARMKQIIWARDKNSEGEESADLFLRGIGLREYSRYICFNFPFTHEQSLLSHLRFFPWDADVDKFKAWRQGRTGYPLVDAGMRELWATGWMHNRIRVIVSSFAVKFLLLPWKWGMKYFWDTLLDADLECDILGWQYISGSIPDGHELDRLDNPALQGAKYDPEGEYIRQWLPELARLPTEWIHHPWDAPLTVLKASGVELGTNYAKPIVDIDTARELLAKAISRTRGAQIMIGAAATLDHNQPYHICRGFTCFKKPPTPPPEPET

SEQ ID NO: 71 - protein, 604 aa, Artificial Sequence
  synthetic construct
MAEPRQEFEVMEDHAGTYGLGDRKDQGGYTMHQDQEGDTDAGLKESPLQTPTEDGSEEPGSETSDAKSTPTAEDVTAPLVDEGAPGKQAAAQPHTEIPEGTTAEEAGIGDTPSLEDEAAGHVTQARMVSKSKDGTGSDDKKAKGADGKTKIATPRGAAPPGQKGQANATRIPAKTPPAPKTPPSSGEPPKSGDRSGYSSPGSPGTPGSRSRTPSLPTPPTREPKKVAVVRTPPKSPSSAKSRLQTAPVPMPDLKNVKSKIGSTENLKHQPGGGKVQIINKKLDLSNVQSKCGSKDNIKHVPGGGSVQIVYKPVDLSKVTSKCGSLGNIHHKPGGGQVEVKSEKLDFKDRVQSKIGSLDNITHVPGGGNKKIETHKLTFRENAKAKTDHGAEIVYKSPVVSGDTSPRHLSNVSSTGSIDMVDSPQLATLADEVSASLAKQGLPDYSLVKALQMAQQNFVITDASLPDNPIVYASRGFLTLTGYSLDQILGRNCRFLQGPETDPRAVDKIRNAITKGVDTSVCLLNYRQDGTTFWNLFFVAGLRDSKGNIVNYVGVQSKVSEDYAKLLVNEQNIEYKGVRTSNMLRRKPGLQSTVPRARDPPDLDN

SEQ ID NO: 72 - protein, 607 aa, Artificial Sequence
  synthetic construct
MAEPRQEFEVMEDHAGTYGLGDRKDQGGYTMHQDQEGDTDAGLKESPLQTPTEDGSEEPGSETSDAKSTPTAEDVTAPLVDEGAPGKQAAAQPHTEIPEGTTAEEAGIGDTPSLEDEAAGHVTQARMVSKSKDGTGSDDKKAKGADGKTKIATPRGAAPPGQKGQANATRIPAKTPPAPKTPPSSGEPPKSGDRSGYSSPGSPGTPGSRSRTPSLPTPPTREPKKVAVVRTPPKSPSSAKSRLQTAPVPMPDLKNVKSKIGSTENLKHQPGGGKVQIINKKLDLSNVQSKCGSKDNIKHVPGGGSVQIVYKPVDLSKVTSKCGSLGNIHHKPGGGQVEVKSEKLDFKDRVQSKIGSLDNITHVPGGGNKKIETHKLTFRENAKAKTDHGAEIVYKSPVVSGDTSPRHLSNVSSTGSIDMVDSPQLATLADEVSASLAKQGLHTLYAPGGYDIMGWLIQIMNRPNPQVELGPVDTSCALILCDLKQKDTPIVYASEAFLYMTGYSNAEVLGRNCRFLQSPDGMVKPKSTRKYVDSNTINTMRKAIDRNAEVQVEVVNFKKNGQRFVNFLTMIPVRDETGEYRYSMGFQCETELQSTVPRARDPPDLDN

SEQ ID NO: 73 - protein, 607 aa, Artificial Sequence; identical to SEQ ID NO: 72
  synthetic construct

SEQ ID NO: 74 - protein, 608 aa, Artificial Sequence
  synthetic construct
MPDYSLVKALQMAQQNFVITDASLPDNPIVYASRGFLTLTGYSLDQILGRNCRFLQGPETDPRAVDKIRNAITKGVDTSVCLLNYRQDGTTFWNLFFVAGLRDSKGNIVNYVGVQSKVSEDYAKLLVNEQNIEYKGVRTSNMLRRKPGSLMAEPRQEFEVMEDHAGTYGLGDRKDQGGYTMHQDQEGDTDAGLKESPLQTPTEDGSEEPGSETSDAKSTPTAEDVTAPLVDEGAPGKQAAAQPHTEIPEGTTAEEAGIGDTPSLEDEAAGHVTQARMVSKSKDGTGSDDKKAKGADGKTKIATPRGAAPPGQKGQANATRIPAKTPPAPKTPPSSGEPPKSGDRSGYSSPGSPGTPGSRSRTPSLPTPPTREPKKVAVVRTPPKSPSSAKSRLQTAPVPMPDLKNVKSKIGSTENLKHQPGGGKVQIINKKLDLSNVQSKCGSKDNIKHVPGGGSVQIVYKPVDLSKVTSKCGSLGNIHHKPGGGQVEVKSEKLDFKDRVQSKIGSLDNITHVPGGGNKKIETHKLTFRENAKAKTDHGAEIVYKSPVVSGDTSPRHLSNVSSTGSIDMVDSPQLATLADEVSASLAKQGLSNSAVDGTAGPGSTGSR

SEQ ID NO: 75 - protein, 1159 aa, Artificial Sequence
  synthetic construct
MKMDKKTIVWFRRDLRIEDNPALAAAAHEGSVFPVFIWCPEEEGQFYPGRASRWWMKQSLAHLSQSLKALGSDLTLIKTHNTISAILDCIRVTGATKVVFNHLYDPVSLVRDHTVKEKLVERGISVQSYNGDLLYEPWEIYCEKGKPFTSFNSYWKKCLDMSIESVMLPPPWRLMPITAAAEAIWACSIEELGLENEAEKPSNALLTRAWSPGWSNADKLLNEFIEKQLIDYAKNSKKVVGNSTSLLSPYLHFGEISVRHVFQCARMKQIIWARDKNSEGEESADLFLRGIGLREYSRYICFNFPFTHEQSLLSHLRFFPWDADVDKFKAWRQGRTGYPLVDAGMRELWATGWMHNRIRVIVSSFAVKFLLLPWKWGMKYFWDTLLDADLECDILGWQYISGSIPDGHELDRLDNPALQGAKYDPEGEYIRQWLPELARLPTEWIHHPWDAPLTVLKASGVELGTNYAKPIVDIDTARELLAKAISRTRGAQIMIGAAARGMSEYIRVTEDENDEPIEIPSEDDGTVLLSTVTAQFPGACGLRYRNPVSQCMRGVRLVEGILHAPDAGWGNLVYVVNYPKDNKRKMDETDASSAVKVKRAVQKTSDLIVLGLPWKTTEQDLKEYFSTFGEVLMVQVKKDLKTGHSKGLGFVRFTEYETQVKVMSQRHMIDGRWCDCKLPNSKQSQDEPLRSRKVFVGRCTEDMTEDELREFFSQYGDVMDVFIPKPFRAFAFVTFADDQIAQSLCGEDLIIKGISVHISNAEPKHNSNRQLERSGRFGGNPGGFGNQGGFGNSRGGGAGLGNNQGSNMGGGMNFGAFSINPAMMAAAQAALQSSWGMMGMLASQQNQSGPSGNNQNQGNMQREPNQAFGSGNNSYSGSNSGAAIGWGSASNAGSGSGFNGGFGSSMDSKSSGWGMSRDPPVATMVSKGEEDNMAIIKEFMRFKVHMEGSVNGHEFEIEGEGEGRPYEGTQTAKLKVTKGGPLPFAWDILSPQFMYGSKAYVKHPADIPDYLKLSFPEGFKWERVMNFEDGGVVTVTQDSSLQDGEFIYKVKLRGTNFPSDGPVMQKKTMGWEASSERMYPEDGALKGEIKQRLKLKDGGHYDAEVKTTYKAKKPVQLPGAYNVNIKLDITSHNEDYTIVEQYERAEGRHSTGGMDELYK

SEQ ID NO: 76 - protein, 1159 aa, Artificial Sequence
  synthetic construct
MKMDKKTIVWFRRDLRIEDNPALAAAAHEGSVFPVFIWCPEEEGQFYPGRASRWWMKQSLAHLSQSLKALGSDLTLIKTHNTISAILDCIRVTGATKVVFNHLYDPVSLVRDHTVKEKLVERGISVQSYNGDLLYEPWEIYCEKGKPFTSFNSYWKKCLDMSIESVMLPPPWRLMPITAAAEAIWACSIEELGLENEAEKPSNALLTRAWSPGWSNADKLLNEFIEKQLIDYAKNSKKVVGNSTSLLSPYLHFGEISVRHVFQCARMKQIIWARDKNSEGEESADLFLRGIGLREYSRYICFNFPFTHEQSLLSHLRFFPWDADVDKFKAWRQGRTGYPLVDAGMRELWATGWMHNRIRVIVSSFAVKFLLLPWKWGMKYFWDTLLDADLECDILGWQYISGSIPDGHELDRLDNPALQGAKYDPEGEYIRQWLPELARLPTEWIHHPWDAPLTVLKASGVELGTNYAKPIVDIDTARELLAKAISRTRGAQIMIGAAARGMSEYIRVTEDENDEPIEIPSEDDGTVLLSTVTAQFPGACGLRYRNPVSQCMRGVRLVEGILHAPDAGWGNLVYVVNYPKDNKRKMDETDASSAVKVKRAVQKTSDLIVLGLPWKTTEQDLKEYFSTFGEVLMVQVKKDLKTGHSKGFGFVRFTEYETQVKVMSQRHMIDGRWCDCKLPNSKQSQDEPLRSRKVFVGRCTEDMTEDELREFFSQYGDVMDVFIPKPFRALAFVTFADDQIAQSLCGEDLIIKGISVHISNAEPKHNSNRQLERSGRFGGNPGGFGNQGGFGNSRGGGAGLGNNQGSNMGGGMNFGAFSINPAMMAAAQAALQSSWGMMGMLASQQNQSGPSGNNQNQGNMQREPNQAFGSGNNSYSGSNSGAAIGWGSASNAGSGSGFNGGFGSSMDSKSSGWGMSRDPPVATMVSKGEEDNMAIIKEFMRFKVHMEGSVNGHEFEIEGEGEGRPYEGTQTAKLKVTKGGPLPFAWDILSPQFMYGSKAYVKHPADIPDYLKLSFPEGFKWERVMNFEDGGVVTVTQDSSLQDGEFIYKVKLRGTNFPSDGPVMQKKTMGWEASSERMYPEDGALKGEIKQRLKLKDGGHYDAEVKTTYKAKKPVQLPGAYNVNIKLDITSHNEDYTIVEQYERAEGRHSTGGMDELYK

SEQ ID NO: 77 - protein, 1157 aa, Artificial Sequence
  synthetic construct
MKMDKKTIVWFRRDLRIEDNPALAAAAHEGSVFPVFIWCPEEEGQFYPGRASRWWMKQSLAHLSQSLKALGSDLTLIKTHNTISAILDCIRVTGATKVVFNHLYDPVSLVRDHTVKEKLVERGISVQSYNGDLLYEPWEIYCEKGKPFTSFNSYWKKCLDMSIESVMLPPPWRLMPITAAAEAIWACSIEELGLENEAEKPSNALLTRAWSPGWSNADKLLNEFIEKQLIDYAKNSKKVVGNSTSLLSPYLHFGEISVRHVFQCARMKQIIWARDKNSEGEESADLFLRGIGLREYSRYICFNFPFTHEQSLLSHLRFFPWDADVDKFKAWRQGRTGYPLVDAGMRELWATGWMHNRIRVIVSSFAVKFLLLPWKWGMKYFWDTLLDADLECDILGWQYISGSIPDGHELDRLDNPALQGAKYDPEGEYIRQWLPELARLPTEWIHHPWDAPLTVLKASGVELGTNYAKPIVDIDTARELLAKAISRTRGAQIMIGAAAQMSEYIRVTEDENDEPIEIPSEDDGTVLLSTVTAQFPGACGLRYRNPVSQCMRGVRLVEGILHAPDAGWGNLVYVVNYPKDNKRKMDETDASSAVKVKRAVQKTSDLIVLGLPWKTTEQDLKEYFSTFGEVLMVQVKKDLKTGHSKGFGFVRFTEYETQVKVMSQRHMIDGRWCDCKLPNSKQSQDEPLRSRKVFVGRCTEDMTEDELREFFSQYGDVMDVFIPKPFRAFAFVTFADDQIAQSLCGEDLIIKGISVHISNAEPKHNSNRQLERSGRFGGNPGGFGNQGGFGNSRGGGAGLGNNQGSNMGGGMNFGAFSINPAMMAAAQAALQSSWGMMGMLASQQNQSGPSGNNQNQGNMQREPNQAFGSGNNSYSGSNSGAAIGWGSASNAGSGSGFNGGFGSSMDSKAAGWGMWDPPVATMVSKGEEDNMAIIKEFMRFKVHMEGSVNGHEFEIEGEGEGRPYEGTQTAKLKVTKGGPLPFAWDILSPQFMYGSKAYVKHPADIPDYLKLSFPEGFKWERVMNFEDGGVVTVTQDSSLQDGEFIYKVKLRGTNFPSDGPVMQKKTMGWEASSERMYPEDGALKGEIKQRLKLKDGGHYDAEVKTTYKAKKPVQLPGAYNVNIKLDITSHNEDYTIVEQYERAEGRHSTGGMDELYK

SEQ ID NO: 78 - protein, 1157 aa, Artificial Sequence
  synthetic construct
MKMDKKTIVWFRRDLRIEDNPALAAAAHEGSVFPVFIWCPEEEGQFYPGRASRWWMKQSLAHLSQSLKALGSDLTLIKTHNTISAILDCIRVTGATKVVFNHLYDPVSLVRDHTVKEKLVERGISVQSYNGDLLYEPWEIYCEKGKPFTSFNSYWKKCLDMSIESVMLPPPWRLMPITAAAEAIWACSIEELGLENEAEKPSNALLTRAWSPGWSNADKLLNEFIEKQLIDYAKNSKKVVGNSTSLLSPYLHFGEISVRHVFQCARMKQIIWARDKNSEGEESADLFLRGIGLREYSRYICFNFPFTHEQSLLSHLRFFPWDADVDKFKAWRQGRTGYPLVDAGMRELWATGWMHNRIRVIVSSFAVKFLLLPWKWGMKYFWDTLLDADLECDILGWQYISGSIPDGHELDRLDNPALQGAKYDPEGEYIRQWLPELARLPTEWIHHPWDAPLTVLKASGVELGTNYAKPIVDIDTARELLAKAISRTRGAQIMIGAAAQMSEYIRVTEDENDEPIEIPSEDDGTVLLSTVTAQFPGACGLRYRNPVSQCMRGVRLVEGILHAPDAGWGNLVYVVNYPKDNKRKMDETDASSAVKVKRAVQKTSDLIVLGLPWKTTEQDLKEYFSTFGEVLMVQVKKDLKTGHSKGFGFVRFTEYETQVKVMSQRHMIDGRWCDCKLPNSKQSQDEPLRSRKVFVGRCTEDMTEDELREFFSQYGDVMDVFIPKPFRAFAFVTFADDQIAQSLCGEDLIIKGISVHISNAEPKHNSNRQLERSGRFGGNPGGFGNQGGFGNSRGGGAGLGNNQGSNMGGGMNFGAFSINPAMMAAAQAALQSSWGMMGMLASQQNQSGPSGNNQNQGNMQREPNQAFGSGNNSYSGSNSGAAIGWGSASNAGSGSGFNGGFGSSMDSKDDGWGMWDPPVATMVSKGEEDNMAIIKEFMRFKVHMEGSVNGHEFEIEGEGEGRPYEGTQTAKLKVTKGGPLPFAWDILSPQFMYGSKAYVKHPADIPDYLKLSFPEGFKWERVMNFEDGGVVTVTQDSSLQDGEFIYKVKLRGTNFPSDGPVMQKKTMGWEASSERMYPEDGALKGEIKQRLKLKDGGHYDAEVKTTYKAKKPVQLPGAYNVNIKLDITSHNEDYTIVEQYERAEGRHSTGGMDELYK

SEQ ID NO: 79 - protein, 1156 aa, Artificial Sequence
  synthetic construct
MKMDKKTIVWFRRDLRIEDNPALAAAAHEGSVFPVFIWCPEEEGQFYPGRASRWWMKQSLAHLSQSLKALGSDLTLIKTHNTISAILDCIRVTGATKVVFNHLYDPVSLVRDHTVKEKLVERGISVQSYNGDLLYEPWEIYCEKGKPFTSFNSYWKKCLDMSIESVMLPPPWRLMPITAAAEAIWACSIEELGLENEAEKPSNALLTRAWSPGWSNADKLLNEFIEKQLIDYAKNSKKVVGNSTSLLSPYLHFGEISVRHVFQCARMKQIIWARDKNSEGEESADLFLRGIGLREYSRYICFNFPFTHEQSLLSHLRFFPWDADVDKFKAWRQGRTGYPLVDAGMRELWATGWMHNRIRVIVSSFAVKFLLLPWKWGMKYFWDTLLDADLECDILGWQYISGSIPDGHELDRLDNPALQGAKYDPEGEYIRQWLPELARLPTEWIHHPWDAPLTVLKASGVELGTNYAKPIVDIDTARELLAKAISRTRGAQIMIGAAAQMSEYIRVTEDENDEPIEIPSEDDGTVLLSTVTAQFPGACGLRYRNPVSQCMRGVRLVEGILHAPDAGWGNLVYVVNYPKDNKRKMDETDASSAVKVKRAVQKTSDLIVLGLPWKTTEQDLKEYFSTFGEVLMVQVKKDLKTGHSKGFGFVRFTEYETQVKVMSQRHMIDGRWCDCKLPNSKQSQDEPLRSRKVFVGRCTEDMTEDELREFFSQYGDVMDVFIPKPFRAFAFVTFADDQIAQSLCGEDLIIKGISVHISNAEPKHNSNRQLERSGRFGGNPGGFGNQGGFGNSRGGGAGLGNNQGSNMGGGMNFGAFSINPVMMAAAQAALQSSWGMMGMLASQQNQSGPSGNNQNQGNMQREPNQAFGSGNNSYSGSNSGAAIGWGSASNAGSGSGFNGGFGSSMDSKSSGWGWDPPVATMVSKGEEDNMAIIKEFMRFKVHMEGSVNGHEFEIEGEGEGRPYEGTQTAKLKVTKGGPLPFAWDILSPQFMYGSKAYVKHPADIPDYLKLSFPEGFKWERVMNFEDGGVVTVTQDSSLQDGEFIYKVKLRGTNFPSDGPVMQKKTMGWEASSERMYPEDGALKGEIKQRLKLKDGGHYDAEVKTTYKAKKPVQLPGAYNVNIKLDITSHNEDYTIVEQYERAEGRHSTGGMDELYK

SEQ ID NO: 80 - protein, 1156 aa, Artificial Sequence
  synthetic construct
MKMDKKTIVWFRRDLRIEDNPALAAAAHEGSVFPVFIWCPEEEGQFYPGRASRWWMKQSLAHLSQSLKALGSDLTLIKTHNTISAILDCIRVTGATKVVFNHLYDPVSLVRDHTVKEKLVERGISVQSYNGDLLYEPWEIYCEKGKPFTSFNSYWKKCLDMSIESVMLPPPWRLMPITAAAEAIWACSIEELGLENEAEKPSNALLTRAWSPGWSNADKLLNEFIEKQLIDYAKNSKKVVGNSTSLLSPYLHFGEISVRHVFQCARMKQIIWARDKNSEGEESADLFLRGIGLREYSRYICFNFPFTHEQSLLSHLRFFPWDADVDKFKAWRQGRTGYPLVDAGMRELWATGWMHNRIRVIVSSFAVKFLLLPWKWGMKYFWDTLLDADLECDILGWQYISGSIPDGHELDRLDNPALQGAKYDPEGEYIRQWLPELARLPTEWIHHPWDAPLTVLKASGVELGTNYAKPIVDIDTARELLAKAISRTRGAQIMIGAAAQMSEYIRVTEDENDEPIEIPSEDDGTVLLSTVTAQFPGACGLRYRNPVSQCMRGVRLVEGILHAPDAGWGNLVYVVNYPKDNKRKMDETDASSAVKVKRAVQKTSDLIVLGLPWKTTEQDLKEYFSTFGEVLMVQVKKDLKTGHSKGFGFVRFTEYETQVKVMSQRHMIDGRWCDCKLPNSKQSQDEPLRSRKVFVGRCTEDMTEDELREFFSQYGDVMDVFIPKPFRAFAFVTFADDQIAQSLCGEDLIIKGISVHISNAEPKHNSNRQLERSGRFGGNPGGFGNQGGFGNSRGGGAGLGNNQGSNMGGGMNFGAFSINPAMMAAAQAALQSSWGMVGMLASQQNQSGPSGNNQNQGNMQREPNQAFGSGNNSYSGSNSGAAIGWGSASNAGSGSGFNGGFGSSMDSKSSGWGWDPPVATMVSKGEEDNMAIIKEFMRFKVHMEGSVNGHEFEIEGEGEGRPYEGTQTAKLKVTKGGPLPFAWDILSPQFMYGSKAYVKHPADIPDYLKLSFPEGFKWERVMNFEDGGVVTVTQDSSLQDGEFIYKVKLRGTNFPSDGPVMQKKTMGWEASSERMYPEDGALKGEIKQRLKLKDGGHYDAEVKTTYKAKKPVQLPGAYNVNIKLDITSHNEDYTIVEQYERAEGRHSTGGMDELYK

SEQ ID NO: 81 - protein, 884 aa, Artificial Sequence
  synthetic construct
MKMDKKTIVWFRRDLRIEDNPALAAAAHEGSVFPVFIWCPEEEGQFYPGRASRWWMKQSLAHLSQSLKALGSDLTLIKTHNTISAILDCIRVTGATKVVFNHLYDPVSLVRDHTVKEKLVERGISVQSYNGDLLYEPWEIYCEKGKPFTSFNSYWKKCLDMSIESVMLPPPWRLMPITAAAEAIWACSIEELGLENEAEKPSNALLTRAWSPGWSNADKLLNEFIEKQLIDYAKNSKKVVGNSTSLLSPYLHFGEISVRHVFQCARMKQIIWARDKNSEGEESADLFLRGIGLREYSRYICFNFPFTHEQSLLSHLRFFPWDADVDKFKAWRQGRTGYPLVDAGMRELWATGWMHNRIRVIVSSFAVKFLLLPWKWGMKYFWDTLLDADLECDILGWQYISGSIPDGHELDRLDNPALQGAKYDPEGEYIRQWLPELARLPTEWIHHPWDAPLTVLKASGVELGTNYAKPIVDIDTARELLAKAISRTRGAQIMIGAAAQGRFGGNPGGFGNQGGFGNSRGGGAGLGNNQGSNMGGGMNFGAFSINPVMMAAAQAALQSSWGMMGMLASQQNQSGPSGNNQNQGNMQREPNQAFGSGNNSYSGSNSGAAIGWGSASNAGSGSGFNGGFGSSMDSKSSGWGMRDPPVATMVSKGEEDNMAIIKEFMRFKVHMEGSVNGHEFEIEGEGEGRPYEGTQTAKLKVTKGGPLPFAWDILSPQFMYGSKAYVKHPADIPDYLKLSFPEGFKWERVMNFEDGGVVTVTQDSSLQDGEFIYKVKLRGTNFPSDGPVMQKKTMGWEASSERMYPEDGALKGEIKQRLKLKDGGHYDAEVKTTYKAKKPVQLPGAYNVNIKLDITSHNEDYTIVEQYERAEGRHSTGGMDELYK

SEQ ID NO: 82 - protein, 884 aa, Artificial Sequence
  synthetic construct
MKMDKKTIVWFRRDLRIEDNPALAAAAHEGSVFPVFIWCPEEEGQFYPGRASRWWMKQSLAHLSQSLKALGSDLTLIKTHNTISAILDCIRVTGATKVVFNHLYDPVSLVRDHTVKEKLVERGISVQSYNGDLLYEPWEIYCEKGKPFTSFNSYWKKCLDMSIESVMLPPPWRLMPITAAAEAIWACSIEELGLENEAEKPSNALLTRAWSPGWSNADKLLNEFIEKQLIDYAKNSKKVVGNSTSLLSPYLHFGEISVRHVFQCARMKQIIWARDKNSEGEESADLFLRGIGLREYSRYICFNFPFTHEQSLLSHLRFFPWDADVDKFKAWRQGRTGYPLVDAGMRELWATGWMHNRIRVIVSSFAVKFLLLPWKWGMKYFWDTLLDADLECDILGWQYISGSIPDGHELDRLDNPALQGAKYDPEGEYIRQWLPELARLPTEWIHHPWDAPLTVLKASGVELGTNYAKPIVDIDTARELLAKAISRTRGAQIMIGAAAQGRFGGNPGGFGNQGGFGNSRGGGAGLGNNQGSNMGGGMNFGAFSINPAMMAAAQAALQSSWGMVGMLASQQNQSGPSGNNQNQGNMQREPNQAFGSGNNSYSGSNSGAAIGWGSASNAGSGSGFNGGFGSSMDSKSSGWGMRDPPVATMVSKGEEDNMAIIKEFMRFKVHMEGSVNGHEFEIEGEGEGRPYEGTQTAKLKVTKGGPLPFAWDILSPQFMYGSKAYVKHPADIPDYLKLSFPEGFKWERVMNFEDGGVVTVTQDSSLQDGEFIYKVKLRGTNFPSDGPVMQKKTMGWEASSERMYPEDGALKGEIKQRLKLKDGGHYDAEVKTTYKAKKPVQLPGAYNVNIKLDITSHNEDYTIVEQYERAEGRHSTGGMDELYK

SEQ ID NO: 83 - protein, 884 aa, Artificial Sequence
  synthetic construct
MKMDKKTIVWFRRDLRIEDNPALAAAAHEGSVFPVFIWCPEEEGQFYPGRASRWWMKQSLAHLSQSLKALGSDLTLIKTHNTISAILDCIRVTGATKVVFNHLYDPVSLVRDHTVKEKLVERGISVQSYNGDLLYEPWEIYCEKGKPFTSFNSYWKKCLDMSIESVMLPPPWRLMPITAAAEAIWACSIEELGLENEAEKPSNALLTRAWSPGWSNADKLLNEFIEKQLIDYAKNSKKVVGNSTSLLSPYLHFGEISVRHVFQCARMKQIIWARDKNSEGEESADLFLRGIGLREYSRYICFNFPFTHEQSLLSHLRFFPWDADVDKFKAWRQGRTGYPLVDAGMRELWATGWMHNRIRVIVSSFAVKFLLLPWKWGMKYFWDTLLDADLECDILGWQYISGSIPDGHELDRLDNPALQGAKYDPEGEYIRQWLPELARLPTEWIHHPWDAPLTVLKASGVELGTNYAKPIVDIDTARELLAKAISRTRGAQIMIGAAAQGRFGGNPGGFGNQGGFGNSRGGGAGLGNNQGSNMGGGMNFGAFSINPAMMAAAQAALQSSWGMMGMLASQQNQSGPSGNNQNQGNMQREPNQAFGSGNNSYSGSNSGAAIGWGSASNAGSGSGFNGGFGSSMDSKAAGWGMRDPPVATMVSKGEEDNMAIIKEFMRFKVHMEGSVNGHEFEIEGEGEGRPYEGTQTAKLKVTKGGPLPFAWDILSPQFMYGSKAYVKHPADIPDYLKLSFPEGFKWERVMNFEDGGVVTVTQDSSLQDGEFIYKVKLRGTNFPSDGPVMQKKTMGWEASSERMYPEDGALKGEIKQRLKLKDGGHYDAEVKTTYKAKKPVQLPGAYNVNIKLDITSHNEDYTIVEQYERAEGRHSTGGMDELYK

SEQ ID NO: 84 - protein, 885 aa, Artificial Sequence
  synthetic construct
MKMDKKTIVWFRRDLRIEDNPALAAAAHEGSVFPVFIWCPEEEGQFYPGRASRWWMKQSLAHLSQSLKALGSDLTLIKTHNTISAILDCIRVTGATKVVFNHLYDPVSLVRDHTVKEKLVERGISVQSYNGDLLYEPWEIYCEKGKPFTSFNSYWKKCLDMSIESVMLPPPWRLMPITAAAEAIWACSIEELGLENEAEKPSNALLTRAWSPGWSNADKLLNEFIEKQLIDYAKNSKKVVGNSTSLLSPYLHFGEISVRHVFQCARMKQIIWARDKNSEGEESADLFLRGIGLREYSRYICFNFPFTHEQSLLSHLRFFPWDADVDKFKAWRQGRTGYPLVDAGMRELWATGWMHNRIRVIVSSFAVKFLLLPWKWGMKYFWDTLLDADLECDILGWQYISGSIPDGHELDRLDNPALQGAKYDPEGEYIRQWLPELARLPTEWIHHPWDAPLTVLKASGVELGTNYAKPIVDIDTARELLAKAISRTRGAQIMIGAAAPGRFGGNPGGFGNQGGFGNSRGGGAGLGNNQGSNMGGGMNFGAFSINPAMMAAAQAALQSSWGMMGMLASQQNQSGPSGNNQNQGNMQREPNQAFGSGNNSYSGSNSGAAIGWGSASNAGSGSGFNGGFGSSMDSKDDGWGMTRDPPVATMVSKGEEDNMAIIKEFMRFKVHMEGSVNGHEFEIEGEGEGRPYEGTQTAKLKVTKGGPLPFAWDILSPQFMYGSKAYVKHPADIPDYLKLSFPEGFKWERVMNFEDGGVVTVTQDSSLQDGEFIYKVKLRGTNFPSDGPVMQKKTMGWEASSERMYPEDGALKGEIKQRLKLKDGGHYDAEVKTTYKAKKPVQLPGAYNVNIKLDITSHNEDYTIVEQYERAEGRHSTGGMDELYK

SEQ ID NO: 85 - protein, 1157 aa, Artificial Sequence
  synthetic construct
MKMDKKTIVWFRRDLRIEDNPALAAAAHEGSVFPVFIWCPEEEGQFYPGRASRWWMKQSLAHLSQSLKALGSDLTLIKTHNTISAILDCIRVTGATKVVFNHLYDPVSLVRDHTVKEKLVERGISVQSYNGDLLYEPWEIYCEKGKPFTSFNSYWKKCLDMSIESVMLPPPWRLMPITAAAEAIWACSIEELGLENEAEKPSNALLTRAWSPGWSNADKLLNEFIEKQLIDYAKNSKKVVGNSTSLLSPYLHFGEISVRHVFQCARMKQIIWARDKNSEGEESADLFLRGIGLREYSRYICFNFPFTHEQSLLSHLRFFPWDADVDKFKAWRQGRTGYPLVDAGMRELWATGWMHNRIRVIVSSFAVKFLLLPWKWGMKYFWDTLLDADLECDILGWQYISGSIPDGHELDRLDNPALQGAKYDPEGEYIRQWLPELARLPTEWIHHPWDAPLTVLKASGVELGTNYAKPIVDIDTARELLAKAISRTRGAQIMIGAAAQMSEYIRVTEDENDEPIEIPSEDDGTVLLSTVTAQFPGACGLRYRNPVSQCMRGVRLVEGILHAPDAGWGNLVYVVNYPKDNKRKMDETDASSAVKVKRAVQKTSDLIVLGLPWKTTEQDLKEYFSTFGEVLMVQVKKDLKTGHSKGLGLVRFTEYETQVKVMSQRHMIDGRWCDCKLPNSKQSQDEPLRSRKVLVGRCTEDMTEDELREFFSQYGDVMDVFIPKPFRALALVTFADDQIAQSLCGEDLIIKGISVHISNAEPKHNSNRQLERSGRFGGNPGGFGNQGGFGNSRGGGAGLGNNQGSNMGGGMNFGAFSINPAMMAAAQAALQSSWGMMGMLASQQNQSGPSGNNQNQGNMQREPNQAFGSGNNSYSGSNSGAAIGWGSASNAGSGSGFNGGFGSSMDSKSSGWGMWDPPVATMVSKGEEDNMAIIKEFMRFKVHMEGSVNGHEFEIEGEGEGRPYEGTQTAKLKVTKGGPLPFAWDILSPQFMYGSKAYVKHPADIPDYLKLSFPEGFKWERVMNFEDGGVVTVTQDSSLQDGEFIYKVKLRGTNFPSDGPVMQKKTMGWEASSERMYPEDGALKGEIKQRLKLKDGGHYDAEVKTTYKAKKPVQLPGAYNVNIKLDITSHNEDYTIVEQYERAEGRHSTGGMDELYK

SEQ ID NO: 86 - protein, 829 aa, Artificial Sequence
  synthetic construct
MKMDKKTIVWFRRDLRIEDNPALAAAAHEGSVFPVFIWCPEEEGQFYPGRASRWWMKQSLAHLSQSLKALGSDLTLIKTHNTISAILDCIRVTGATKVVFNHLYDPVSLVRDHTVKEKLVERGISVQSYNGDLLYEPWEIYCEKGKPFTSFNSYWKKCLDMSIESVMLPPPWRLMPITAAAEAIWACSIEELGLENEAEKPSNALLTRAWSPGWSNADKLLNEFIEKQLIDYAKNSKKVVGNSTSLLSPYLHFGEISVRHVFQCARMKQIIWARDKNSEGEESADLFLRGIGLREYSRYICFNFPFTHEQSLLSHLRFFPWDADVDKFKAWRQGRTGYPLVDAGMRELWATGWMHNRIRVIVSSFAVKFLLLPWKWGMKYFWDTLLDADLECDILGWQYISGSIPDGHELDRLDNPALQGAKYDPEGEYIRQWLPELARLPTEWIHHPWDAPLTVLKASGVELGTNYAKPIVDIDTARELLAKAISRTRGAQIMIGAAAQDLIVLGLPWKTTEQDLKEYFSTFGEVLMVQVKKDLKTGHSKGFGFVRFTEYETQVKVMSQRHMIDGRWCDCKLPNSKQSQDEPLRSRDPPVATMVSKGEEDNMAIIKEFMRFKVHMEGSVNGHEFEIEGEGEGRPYEGTQTAKLKVTKGGPLPFAWDILSPQFMYGSKAYVKHPADIPDYLKLSFPEGFKWERVMNFEDGGVVTVTQDSSLQDGEFIYKVKLRGTNFPSDGPVMQKKTMGWEASSERMYPEDGALKGEIKQRLKLKDGGHYDAEVKTTYKAKKPVQLPGAYNVNIKLDITSHNEDYTIVEQYERAEGRHSTGGMDELYK

SEQ ID NO: 87 - protein, 815 aa, Artificial Sequence
  synthetic construct
MKMDKKTIVWFRRDLRIEDNPALAAAAHEGSVFPVFIWCPEEEGQFYPGRASRWWMKQSLAHLSQSLKALGSDLTLIKTHNTISAILDCIRVTGATKVVFNHLYDPVSLVRDHTVKEKLVERGISVQSYNGDLLYEPWEIYCEKGKPFTSFNSYWKKCLDMSIESVMLPPPWRLMPITAAAEAIWACSIEELGLENEAEKPSNALLTRAWSPGWSNADKLLNEFIEKQLIDYAKNSKKVVGNSTSLLSPYLHFGEISVRHVFQCARMKQIIWARDKNSEGEESADLFLRGIGLREYSRYICFNFPFTHEQSLLSHLRFFPWDADVDKFKAWRQGRTGYPLVDAGMRELWATGWMHNRIRVIVSSFAVKFLLLPWKWGMKYFWDTLLDADLECDILGWQYISGSIPDGHELDRLDNPALQGAKYDPEGEYIRQWLPELARLPTEWIHHPWDAPLTVLKASGVELGTNYAKPIVDIDTARELLAKAISRTRGAQIMIGAAAQRKVFVGRCTEDMTEDELREFFSQYGDVMDVFIPKPFRAFAFVTFADDQIAQSLCGEDLIIKGISVHISNAEPRDPPVATMVSKGEEDNMAIIKEFMRFKVHMEGSVNGHEFEIEGEGEGRPYEGTQTAKLKVTKGGPLPFAWDILSPQFMYGSKAYVKHPADIPDYLKLSFPEGFKWERVMNFEDGGVVTVTQDSSLQDGEFIYKVKLRGTNFPSDGPVMQKKTMGWEASSERMYPEDGALKGEIKQRLKLKDGGHYDAEVKTTYKAKKPVQLPGAYNVNIKLDITSHNEDYTIVEQYERAEGRHSTGGMDELYK

SEQ ID NO: 88 - protein, 901 aa, Artificial Sequence
  synthetic construct
MKMDKKTIVWFRRDLRIEDNPALAAAAHEGSVFPVFIWCPEEEGQFYPGRASRWWMKQSLAHLSQSLKALGSDLTLIKTHNTISAILDCIRVTGATKVVFNHLYDPVSLVRDHTVKEKLVERGISVQSYNGDLLYEPWEIYCEKGKPFTSFNSYWKKCLDMSIESVMLPPPWRLMPITAAAEAIWACSIEELGLENEAEKPSNALLTRAWSPGWSNADKLLNEFIEKQLIDYAKNSKKVVGNSTSLLSPYLHFGEISVRHVFQCARMKQIIWARDKNSEGEESADLFLRGIGLREYSRYICFNFPFTHEQSLLSHLRFFPWDADVDKFKAWRQGRTGYPLVDAGMRELWATGWMHNRIRVIVSSFAVKFLLLPWKWGMKYFWDTLLDADLECDILGWQYISGSIPDGHELDRLDNPALQGAKYDPEGEYIRQWLPELARLPTEWIHHPWDAPLTVLKASGVELGTNYAKPIVDIDTARELLAKAISRTRGAQIMIGAAAQDLIVLGLPWKTTEQDLKEYFSTFGEVLMVQVKKDLKTGHSKGFGFVRFTEYETQVKVMSQRHMIDGRWCDCKLPNSKQSQDEPLRSRKVFVGRCTEDMTEDELREFFSQYGDVMDVFIPKPFRAFAFVTFADDQIAQSLCGEDLIIKGISVHISNAEPRDPPVATMVSKGEEDNMAIIKEFMRFKVHMEGSVNGHEFEIEGEGEGRPYEGTQTAKLKVTKGGPLPFAWDILSPQFMYGSKAYVKHPADIPDYLKLSFPEGFKWERVMNFEDGGVVTVTQDSSLQDGEFIYKVKLRGTNFPSDGPVMQKKTMGWEASSERMYPEDGALKGEIKQRLKLKDGGHYDAEVKTTYKAKKPVQLPGAYNVNIKLDITSHNEDYTIVEQYERAEGRHSTGGMDELYK

SEQ ID NO: 89 - protein, 1016 aa, Artificial Sequence
  synthetic construct
MKMDKKTIVWFRRDLRIEDNPALAAAAHEGSVFPVFIWCPEEEGQFYPGRASRWWMKQSLAHLSQSLKALGSDLTLIKTHNTISAILDCIRVTGATKVVFNHLYDPVSLVRDHTVKEKLVERGISVQSYNGDLLYEPWEIYCEKGKPFTSFNSYWKKCLDMSIESVMLPPPWRLMPITAAAEAIWACSIEELGLENEAEKPSNALLTRAWSPGWSNADKLLNEFIEKQLIDYAKNSKKVVGNSTSLLSPYLHFGEISVRHVFQCARMKQIIWARDKNSEGEESADLFLRGIGLREYSRYICFNFPFTHEQSLLSHLRFFPWDADVDKFKAWRQGRTGYPLVDAGMRELWATGWMHNRIRVIVSSFAVKFLLLPWKWGMKYFWDTLLDADLECDILGWQYISGSIPDGHELDRLDNPALQGAKYDPEGEYIRQWLPELARLPTEWIHHPWDAPLTVLKASGVELGTNYAKPIVDIDTARELLAKAISRTRGAQIMIGAAAQMSEYIRVTEDENDEPIEIPSEDDGTVLLSTVTAQFPGACGLRYRNPVSQCMRGVRLVEGILHAPDAGWGNLVYVVNYPKDNKRKMDETDASSAVKVKRAVQKTSDLIVLGLPWKTTEQDLKEYFSTFGEVLMVQVKKDLKTGHSKGFGFVRFTEYETQVKVMSQRHMIDGRWCDCKLPNSKQSQDEPLRSRKVFVGRCTEDMTEDELREFFSQYGDVMDVFIPKPFRAFAFVTFADDQIAQSLCGEDLIIKGISVHISNAEPKHNSNRQLERSRDPPVATMVSKGEEDNMAIIKEFMRFKVHMEGSVNGHEFEIEGEGEGRPYEGTQTAKLKVTKGGPLPFAWDILSPQFMYGSKAYVKHPADIPDYLKLSFPEGFKWERVMNFEDGGVVTVTQDSSLQDGEFIYKVKLRGTNFPSDGPVMQKKTMGWEASSERMYPEDGALKGEIKQRLKLKDGGHYDAEVKTTYKAKKPVQLPGAYNVNIKLDITSHNEDYTIVEQYERAEGRHSTGGMDELYK

SEQ ID NO: 90 - protein, 1040 aa, Artificial Sequence
  synthetic construct
MKMDKKTIVWFRRDLRIEDNPALAAAAHEGSVFPVFIWCPEEEGQFYPGRASRWWMKQSLAHLSQSLKALGSDLTLIKTHNTISAILDCIRVTGATKVVFNHLYDPVSLVRDHTVKEKLVERGISVQSYNGDLLYEPWEIYCEKGKPFTSFNSYWKKCLDMSIESVMLPPPWRLMPITAAAEAIWACSIEELGLENEAEKPSNALLTRAWSPGWSNADKLLNEFIEKQLIDYAKNSKKVVGNSTSLLSPYLHFGEISVRHVFQCARMKQIIWARDKNSEGEESADLFLRGIGLREYSRYICFNFPFTHEQSLLSHLRFFPWDADVDKFKAWRQGRTGYPLVDAGMRELWATGWMHNRIRVIVSSFAVKFLLLPWKWGMKYFWDTLLDADLECDILGWQYISGSIPDGHELDRLDNPALQGAKYDPEGEYIRQWLPELARLPTEWIHHPWDAPLTVLKASGVELGTNYAKPIVDIDTARELLAKAISRTRGAQIMIGAAAQCRATMYPYDVPDYAMASNDYTQQATQSYGAYPTQPGQGYSQQSSQPYGQQSYSGYSQSTDTSGYGQSSYSSYGQSQNTGYGTQSTPQGYGSTGGYGSSQSSQSSYGQQSSYPGYGQQPAPSSTSGSYGSSSQSSSYGQPQSGSYSQQPSYGGQQQSYGQQQSYNPPQGYGQQNQYNSSSGGGGGGGGGGNYGQDQSSMSSGGGSGGGYGNQDQSGGGGSGGYGQQDRGGRGRGGSGGGGGGGGGGYNRSSGGYEPRGRGGGRGGRGGMGGSDRGGFNKFGGPRDQGSRHDSEQDNSDNNTIFVQGLGENVTIESVADYFKQIGIIKTNKKTGQPMINLYTDRETGKLKGEATVSFDDPPSAKAAIDWFDGKEFSGNPIKVSFATRRADFNRGGGNGRGGRGRGGPMGRGGYGGGGSGGGGRGGFPSGGGGGGGQQRAGDWKCPNPTCENMNFSWRNECNQCKAPKPDGPGGGPGGSHMGGNYGDDRRGGRGGYDRGGYRGRGGDRGGFRGGRGGGDRGGFGPGKMDSRGEHRQDRRERPY

SEQ ID NO: 91 - protein, 1283 aa, Artificial Sequence
  synthetic construct
MKMDKKTIVWFRRDLRIEDNPALAAAAHEGSVFPVFIWCPEEEGQFYPGRASRWWMKQSLAHLSQSLKALGSDLTLIKTHNTISAILDCIRVTGATKVVFNHLYDPVSLVRDHTVKEKLVERGISVQSYNGDLLYEPWEIYCEKGKPFTSFNSYWKKCLDMSIESVMLPPPWRLMPITAAAEAIWACSIEELGLENEAEKPSNALLTRAWSPGWSNADKLLNEFIEKQLIDYAKNSKKVVGNSTSLLSPYLHFGEISVRHVFQCARMKQIIWARDKNSEGEESADLFLRGIGLREYSRYICFNFPFTHEQSLLSHLRFFPWDADVDKFKAWRQGRTGYPLVDAGMRELWATGWMHNRIRVIVSSFAVKFLLLPWKWGMKYFWDTLLDADLECDILGWQYISGSIPDGHELDRLDNPALQGAKYDPEGEYIRQWLPELARLPTEWIHHPWDAPLTVLKASGVELGTNYAKPIVDIDTARELLAKAISRTRGAQIMIGAAAQCRATMYPYDVPDYAMASNDYTQQATQSYGAYPTQPGQGYSQQSSQPYGQQSYSGYSQSTDTSGYGQSSYSSYGQSQNTGYGTQSTPQGYGSTGGYGSSQSSQSSYGQQSSYPGYGQQPAPSSTSGSYGSSSQSSSYGQPQSGSYSQQPSYGGQQQSYGQQQSYNPPQGYGQQNQYNSSSGGGGGGGGGGNYGQDQSSMSSGGGSGGGYGNQDQSGGGGSGGYGQQDRGGRGRGGSGGGGGGGGGGYNRSSGGYEPRGRGGGRGGRGGMGGSDRGGFNKFGGPRDQGSRHDSEQDNSDNNTIFVQGLGENVTIESVADYFKQIGIIKTNKKTGQPMINLYTDRETGKLKGEATVSFDDPPSAKAAIDWFDGKEFSGNPIKVSFATRRADFNRGGGNGRGGRGRGGPMGRGGYGGGGSGGGGRGGFPSGGGGGGGQQRAGDWKCPNPTCENMNFSWRNECNQCKAPKPDGPGGGPGGSHMGGNYGDDRRGGRGGYDRGGYRGRGGDRGGFRGGRGGGDRGGFGPGKMDSRGEHRQDRRERPYWDPPVATMVSKGEEDNMAIIKEFMRFKVHMEGSVNGHEFEIEGEGEGRPYEGTQTAKLKVTKGGPLPFAWDILSPQFMYGSKAYVKHPADIPDYLKLSFPEGFKWERVMNFEDGGVVTVTQDSSLQDGEFIYKVKLRGTNFPSDGPVMQKKTMGWEASSERMYPEDGALKGEIKQRLKLKDGGHYDAEVKTTYKAKKPVQLPGAYNVNIKLDITSHNEDYTIVEQYERAEGRHSTGGMDELYK

SEQ ID NO: 92 - protein, 348 aa, Artificial Sequence
  synthetic construct
MNGLTPPLMFCSRSDDPSSTSNINLDDVFADVFFNSNGELLDIDEIDDFGDNTCPKSSMSVDDDASSQVFQGHLFGNALSSIALSDSGDLSTGIYESQGNASRGKSLRTKSSGSISSELTEAQKVERRERNREHAKRSRVRKKFLLESLQQSVNELNHENNCLKESIREHLGPRGDSLIAQCSPEADTLLTDNPSKANRILEDPDYSLVKALQMAQQNFVITDASLPDNPIVYASRGFLTLTGYSLDQILGRNCRFLQGPETDPRAVDKIRNAITKGVDTSVCLLNYRQDGTTFWNLFFVAGLRDSKGNIVNYVGVQSKVSEDYAKLLVNEQNIEYKGVRTSNMLRRK

SEQ ID NO: 93 - protein, 145 aa, Artificial Sequence
  synthetic construct
PDYSLVKALQMAQQNFVITDASLPDNPIVYASRGFLTLTGYSLDQILGRNCRFLQGPETDPRAVDKIRNAITKGVDTSVCLLNYRQDGTTFWNLFFVAGLRDSKGNIVNYVGVQSKVSEDYAKLLVNEQNIEYKGVRTSNMLRRK

SEQ ID NO: 94 - DNA, 435 bp, Artificial Sequence
  synthetic construct
cctgactacagtctcgtgaaggctctgcaaatggcacaacagaattttgtcattacagacgcctccctcccagacaaccctatcgtctacgccagtagagggtttctgacactgacaggctattctctcgaccagatcctgggcaggaactgcaggtttctgcaagggccagaaacagacccaagagctgtggataagatcaggaatgccatcaccaaaggcgttgataccagtgtctgtctgctgaattatagacaggatggcacaaccttctggaatctcttcttcgtggctggactcagagattctaagggcaatattgtcaactacgtcggagtgcagtcaaaggtgagcgaagattatgccaagctgctggtcaacgagcagaacattgagtacaaaggtgtgcgcaccagtaacatgctgcgcagaaag

SEQ ID NO: 95 - protein, 414 aa, Artificial Sequence
  synthetic construct
MSEYIRVTEDENDEPIEIPSEDDGTVLLSTVTAQFPGACGLRYRNPVSQCMRGVRLVEGILHAPDAGWGNLVYVVNYPKDNKRKMDETDASSAVKVKRAVQKTSDLIVLGLPWKTTEQDLKEYFSTFGEVLMVQVKKDLKTGHSKGFGFVRFTEYETQVKVMSQRHMIDGRWCDCKLPNSKQSQDEPLRSRKVFVGRCTEDMTEDELREFFSQYGDVMDVFIPKPFRAFAFVTFADDQIAQSLCGEDLIIKGISVHISNAEPKHNSNRQLERSGRFGGNPGGFGNQGGFGNSRGGGAGLGNNQGSNMGGGMNFGAFSINPAMMAAAQAALQSSWGMMGMLASQQNQSGPSGNNQNQGNMQREPNQAFGSGNNSYSGSNSGAAIGWGSASNAGSGSGFNGGFGSSMDSKSSGWGM

SEQ ID NO: 96 - protein, 311 aa, Artificial Sequence
  synthetic construct
MDLIVLGLPWKTTEQDLKEYFSTFGEVLMVQVKKDLKTGHSKGFGFVRFTEYETQVKVMSQRHMIDGRWCDCKLPNSKQSQDEPLRSRKVFVGRCTEDMTEDELREFFSQYGDVMDVFIPKPFRAFAFVTFADDQIAQSLCGEDLIIKGISVHISNAEPKHNSNRQLERSGRFGGNPGGFGNQGGFGNSRGGGAGLGNNQGSNMGGGMNFGAFSINPAMMAAAQAALQSSWGMMGMLASQQNQSGPSGNNQNQGNMQREPNQAFGSGNNSYSGSNSGAAIGWGSASNAGSGSGFNGGFGSSMDSKSSGWGM

SEQ ID NO: 97 - protein, 225 aa, Artificial Sequence
  synthetic construct
MRKVFVGRCTEDMTEDELREFFSQYGDVMDVFIPKPFRAFAFVTFADDQIAQSLCGEDLIIKGISVHISNAEPKHNSNRQLERSGRFGGNPGGFGNQGGFGNSRGGGAGLGNNQGSNMGGGMNFGAFSINPAMMAAAQAALQSSWGMMGMLASQQNQSGPSGNNQNQGNMQREPNQAFGSGNNSYSGSNSGAAIGWGSASNAGSGSGFNGGFGSSMDSKSSGWGM

SEQ ID NO: 98 - protein, 142 aa, Artificial Sequence
  synthetic construct
MGRFGGNPGGFGNQGGFGNSRGGGAGLGNNQGSNMGGGMNFGAFSINPAMMAAAQAALQSSWGMMGMLASQQNQSGPSGNNQNQGNMQREPNQAFGSGNNSYSGSNSGAAIGWGSASNAGSGSGFNGGFGSSMDSKSSGWGM

SEQ ID NO: 99 - protein, 161 aa, Artificial Sequence
  synthetic construct
GEFLATTLERIEKNFVITDPRLPDNPIIFASDSFLQLTEYSREEILGRNCRFLQGPETDRATVRKIRDAIDNQTEVTVQLINYTKSGKKFWNLFHLQPMRDQKGDVQYFIGVQLDGTEHVRDAAEREGVMLIKKTAENIDEAAKELPDANLRPEDLWANHG

SEQ ID NO: 100 - protein, 225 aa, Artificial Sequence
  synthetic construct
MLDMGQDRPIDGSGAPGADDTRVEVQPPAQWVLDLIEASPIASVVSDPRLADNPLIAINQAFTDLTGYSEEECVGRNCRFLAGSGTEPWLTDKIRQGVREHKPVLVEILNYKKDGTPFRNAVLVAPIYDDDDELLYFLGSQVEVDDDQPNMGMARRERAAEMLKTLSPRQLEVTTLVASGLRNKEVAARLGLSEKTVKMHRGLVMEKLNLKTSADLVRIAVEAGI

SEQ ID NO: 101 - protein, 261 aa, Artificial Sequence
  synthetic construct
MASFQSFGIPGQLEVIKKALDHVRVGVVITDPALEDNPIVYVNQGFVQMTGYETEEILGKNCRFLQGKHTDPAEVDNIRTALQNKEPVTVQIQNYKKDGTMFWNELNIDPMEIEDKTYFVGIQNDITKQKEYEKLLEDSLTEITALSTPIVPIRNGISALPLVGNLTEERFNSIVCTLTNILSTSKDDYLIIDLSGLAQVNEQTADQIFKLSHLLKLTGTELIITGIKPELAMKMNKLDANFSSLKTYSNVKDAVKVLPIM

SEQ ID NO: 102 - protein, 176 aa, Artificial Sequence
  synthetic construct
MDQKQFEKIRAVFDRSGVALTLVDMSLPEQPVVLANPPFLRMTGYTEGQILGFNCRFLQRGDENAQARADIRDALKLGRELQVVLRNYRANDEPFDNLLFLHPVGGRPDAPDYFLGSQFELGRSGNSEEAAAAGHAGALTGELARIGTVAARLEMDSRRHLAQAAAALVRAWERRG
